(19) United States
(12) Patent Application Publication
(10) Pub. No.: US 2025/0297018 A1
(43) Pub. Date: Sep. 25, 2025

(54) IL-18BP ANTAGONIST ANTIBODIES AND THEIR USE IN MONOTHERAPY AND COMBINATION THERAPY IN THE TREATMENT OF CANCER

(71) Applicant: Compugen Ltd., Holon (IL)

(72) Inventors: NELS P. NIELSON, Lebanon, NH (US); ALISSA M. CHIASSON, Lebanon, NH (US); ASSAF MENACHEM, Kfar Saba (IL); ERAN OPHIR, Even Yehuda (IL); OLGA LEIDERMAN, Rishon LeZion (IL); TAL FRIDMAN-KFIR, Tel Aviv (IL); MORAN GALPERIN, Ashdod (IL); HADAS GALON TILLEMAN, Ramot HaShavim (IL); DAN BLAT, Raanana (IL); GAD COJOCARU, Ramat-HaSharon (IL); AMIR TOPORIK, Pardes Hanah Carkur (IL); AMIT NOVIK, Binyamina (IL); ZIV ERLICH, Giv’ataim (IL); ZOYA ALTEBER, Nes Ziyona (IL); EVGENY TATIROVSKY, Ramat Gan (IL); MICHAL PERPINIAL, Tel Aviv (IL); LITAL SEVER, Tel Aviv (IL); NADAV COHEN, Rehovot (IL)

(21) Appl. No.: 18/846,112

(22) PCT Filed: Mar. 15, 2023
(86) PCT No.: PCT/US2023/064460

§ 371 Date: Sep. 11, 2024

Related U.S. Application Data
(60) Provisional application No. 63/320,202, filed on Mar. 15, 2022.
(60) Provisional application No. 63/351,242, filed on Jun. 10, 2022.
(60) Provisional application No. 63/478,898, filed on Jan. 6, 2023.

(51) Int. Cl. C07K 16/28; A61K 39/00; A61K 45/06; A61P 35/00; A61P 37/04

(52) U.S. Cl. CPC C07K 16/2866; A61K 45/06; A61P 35/00; A61P 37/04; C07K 16/2896; A61K 2039/507; C07K 2317/522; C07K 2317/524; C07K 2317/526; C07K 2317/53; C07K 2317/565; C07K 2317/76; C07K 2317/92

(57) ABSTRACT

The present invention is directed to anti-IL18-BP antibodies and uses thereof. The present invention is directed to monotherapy and combination treatments with for example immune checkpoint inhibitor antibodies, as described herein.

[0001] This application is a U.S. National Stage Application under 35 U.S.C. § 371 of International Patent Application No. PCT/US2023/064460, filed Mar. 15, 2023, which claims priority to U.S. Patent Application No. 63/320,202 filed Mar. 15, 2022, U.S. Patent Application No. 63/351,242 filed Jun. 10, 2022, and U.S. Patent Application No. 63/478,898 filed Jan. 6, 2023, which are hereby incorporated by reference in their entireties.

### INCORPORATION BY REFERENCE OF SEQUENCE LISTING

[0002] The instant application contains a Sequence Listing, which has been submitted via Patent Center. The Sequence Listing titled 210196-214005US_SL.xml, which was created on Sep. 9, 2024, and is 2,416,965 bytes in size, is hereby incorporated by reference in its entirety.

### BACKGROUND OF THE INVENTION

[0003] Interleukin 18 (IL-18) is a pro-inflammatory cytokine that can stimulate T-cells, NK-cells, and myeloid cells. IL-18 has been proposed as an immunotherapeutic agent for the treatment of cancer, given its ability to stimulate anti-tumor immune cells. However, the clinical efficacy of IL-18 has been limited and as such there is a need for compositions and methods that provide effective IL-18 signaling activity to treat and prevent cancer and other diseases and disorders.

[0004] Interleukin 18 Binding Protein (IL18-BP) binds IL18, prevents the binding of IL18 to its receptor, and thus functions as an inhibitor of the proinflammatory cytokine, IL18. IL18-BP inhibits IL18-induced T and NK cell activation and proliferation, and pro-inflammatory cytokine production, resulting in reduced T and NK cell activity and T-helper type 1 immune responses.

[0005] It is an object of the invention to provide anti-IL18-BP antibodies or use in disease treatment. The present invention meets this need by providing anti-IL18-BP antibodies (including antigen-binding fragments), in particular anti-IL18-BP antibodies that block IL18-BP, can be used in treating diseases such as cancer.

### BRIEF SUMMARY OF THE INVENTION

[0006] The present invention provides compositions and methods related to anti-IL18-BP antibodies.

[0007] In some embodiments, the present invention provides compositions comprising an anti-IL18-BP (interleukin-18 binding protein) antibody for activating T cells, NK cells, NKT cells, Dendritic cells, MAIT T cells, γδ T cells, and/or innate lymphoid cells (ILCs), and/or modulating Myeloid cells, for use in the treatment of cancer, wherein the antibody antagonizes at least one immune inhibitory effect of IL18-BP, optionally wherein the anti-IL18-BP antibody blocks the IL18:IL18-BP binding interaction, optionally wherein the anti-IL18-BP antibody exhibits a binding affinity of lower than 1 pM.

[0008] In some embodiments, the composition comprises an anti-IL18-BP antibody, wherein the anti-IL18-BP competes for binding with an antibody that binds to human IL18-BP of SEQ ID NO:254 and/or the secreted chain of human IL18-BP of SEQ ID NO:255 and/or that competes for binding to IL18.

[0009] In some embodiments, the composition comprises an anti-IL18-BP antibody, wherein the anti-IL18-BP competes for binding with an antibody as described in U.S. Pat. No. 8,436,148, WO2019213686, WO200107480. WO2019051015, WO2014126277A1, WO2012177595, US20140364341, and/or WO2018060447.

[0010] In some embodiments, the composition comprises an anti-IL18-BP antibody, wherein said antibody comprises: the vhCDR1), vhCDR2), vhCDR3), vlCDR1), vlCDR2) and vlCDR3 sequences selected from the group consisting of:
[0011] i. the vhCDR1 (SEQ ID NO: 1), vhCDR2 (SEQ ID NO: 32), vhCDR3 (SEQ ID NO: 3), vlCDR1 (SEQ ID NO: 4), vlCDR2 (SEQ ID NO: 5) and vlCDR3 (SEQ ID NO: 6) sequences of FIG. 1A (66650);
[0012] ii. the vhCDR1 (SEQ ID NO: 7), vhCDR2 (SEQ ID NO: 8), vhCDR3 (SEQ ID NO: 9), vlCDR1 (SEQ ID NO: 10), vlCDR2 (SEQ ID NO: 11) and vlCDR3 (SEQ ID NO: 12) sequences of FIG. 1B (66670);
[0013] iii. the vhCDR1 (SEQ ID NO: 13), vhCDR2 (SEQ ID NO: 14), vhCDR3 (SEQ ID NO: 15), vlCDR1 (SEQ ID NO: 16), vlCDR2 (SEQ ID NO: 17) and vlCDR3 (SEQ ID NO: 18) sequences of FIG. 1C (66692);
[0014] iv. the vhCDR1 (SEQ ID NO: 19), vhCDR2 (SEQ ID NO: 20), vhCDR3 (SEQ ID NO: 21), vlCDR1 (SEQ ID NO: 22), vlCDR2 (SEQ ID NO: 23) and vlCDR3 (SEQ ID NO: 24) sequences of FIG. 1D (66716);
[0015] v. the vhCDR1 (SEQ ID NO: 25), vhCDR2 (SEQ ID NO: 26), vhCDR3 (SEQ ID NO: 27), vlCDR1 (SEQ ID NO: 28), vlCDR2 (SEQ ID NO: 29) and vlCDR3 (SEQ ID NO: 30) sequences of FIG. 1E (66650);
[0016] vi. the vhCDR1 (SEQ ID NO: 31), vhCDR2 (SEQ ID NO: 32), vhCDR3 (SEQ ID NO: 33), vlCDR1 (SEQ ID NO: 34), vlCDR2 (SEQ ID NO: 35) and vlCDR3 (SEQ ID NO: 36) sequences of FIG. 1F (66670);
[0017] vii. the vhCDR1 (SEQ ID NO: 37), vhCDR2 (SEQ ID NO: 38), vhCDR3 (SEQ ID NO: 39), vlCDR1 (SEQ ID NO: 40), vlCDR2 (SEQ ID NO: 41) and vlCDR3 (SEQ ID NO: 42) sequences of FIG. 1G (66692);
[0018] viii. the vhCDR1 (SEQ ID NO: 43), vhCDR2 (SEQ ID NO: 44), vhCDR3 (SEQ ID NO: 45), vlCDR1 (SEQ ID NO: 46), vlCDR2 (SEQ ID NO: 47) and vlCDR3 (SEQ ID NO: 48) sequences of FIG. 1H (66716);
[0019] ix. the vhCDR1 (SEQ ID NO: 43), vhCDR2 (SEQ ID NO: 44), vhCDR3 (SEQ ID NO: 45), vlCDR1 (SEQ ID NO: 46), vlCDR2 (SEQ ID NO: 47) and vlCDR3 (SEQ ID NO: 48) sequences of FIG. 1H (66716);
[0020] x. the vhCDR1 (SEQ ID NO: 844), vhCDR2 (SEQ ID NO: 845), vhCDR3 (SEQ ID NO: 846), vlCDR1 (SEQ ID NO: 847), vlCDR2 (SEQ ID NO: 848) and vlCDR3 (SEQ ID NO: 849) sequences of FIG. 1I (66650);
[0021] xi. the vhCDR1 (SEQ ID NO: 850), vhCDR2 (SEQ ID NO: 851), vhCDR3 (SEQ ID NO: 852), vlCDR1 (SEQ ID NO: 853), vlCDR2 (SEQ ID NO: 854) and vlCDR3 (SEQ ID NO: 855) sequences of FIG. 1J (66670);
[0022] xii. the vhCDR1 (SEQ ID NO: 856), vhCDR2 (SEQ ID NO: 857), vhCDR3 (SEQ ID NO: 858), vlCDR1 (SEQ ID NO: 859), vlCDR2 (SEQ ID NO: 860) and vlCDR3 (SEQ ID NO: 861) sequences of FIG. 1K (66692);
[0023] xiii. the vhCDR1 (SEQ ID NO: 862), vhCDR2 (SEQ ID NO: 863), vhCDR3 (SEQ ID NO: 864), vlCDR1 (SEQ ID NO: 865), vlCDR2 (SEQ ID NO: 866) and vlCDR3 (SEQ ID NO: 867) sequences of FIG. 1L (66716);
[0024] xiv. the vhCDR1 (SEQ ID NO: 55), vhCDR2 (SEQ ID NO: 56), vhCDR3 (SEQ ID NO: 57), vlCDR1 (SEQ ID NO: 60), vlCDR2 (SEQ ID NO: 61) and vlCDR3 (SEQ ID NO: 62) sequences of FIG. 2A (71709);
[0025] xv. the vhCDR1 (SEQ ID NO: 65), vhCDR2 (SEQ ID NO: 66), vhCDR3 (SEQ ID NO: 67), vlCDR1 (SEQ ID NO: 70), vlCDR2 (SEQ ID NO: 71) and vlCDR3 (SEQ ID NO: 72) sequences of FIG. 2B (71719);
[0026] xvi. the vhCDR1 (SEQ ID NO: 75), vhCDR2 (SEQ ID NO: 76), vhCDR3 (SEQ ID NO: 77), vlCDR1 (SEQ ID NO: 80), vlCDR2 (SEQ ID NO: 81) and vlCDR3 (SEQ ID NO: 82) sequences of FIG. 2C (71720);
[0027] xvii. the vhCDR1 (SEQ ID NO: 85), vhCDR2 (SEQ ID NO: 86), vhCDR3 (SEQ ID NO: 87), vlCDR1 (SEQ ID NO: 90), vlCDR2 (SEQ ID NO: 91) and vlCDR3 (SEQ ID NO: 92) sequences of FIG. 2D (71722);
[0028] xviii. the vhCDR1 (SEQ ID NO: 95), vhCDR2 (SEQ ID NO: 96), vhCDR3 (SEQ ID NO: 97), vlCDR1 (SEQ ID NO: 100), vlCDR2 (SEQ ID NO: 101) and vlCDR3 (SEQ ID NO: 102) sequences of FIG. 2E (71701);
[0029] xix. the vhCDR1 (SEQ ID NO: 105), vhCDR2 (SEQ ID NO: 106), vhCDR3 (SEQ ID NO: 107), vlCDR1 (SEQ ID NO: 110), vlCDR2 (SEQ ID NO: 111) and vlCDR3 (SEQ ID NO: 112) sequences of FIG. 2F (71663);
[0030] xx. the vhCDR1 (SEQ ID NO: 115), vhCDR2 (SEQ ID NO: 116), vhCDR3 (SEQ ID NO: 117), vlCDR1 (SEQ ID NO: 120), vlCDR2 (SEQ ID NO: 121) and vlCDR3 (SEQ ID NO: 122) sequences of FIG. 2G (71662);
[0031] xxi. the vhCDR1 (SEQ ID NO: 125), vhCDR2 (SEQ ID NO: 126), vhCDR3 (SEQ ID NO: 127), vlCDR1 (SEQ ID NO: 130), vlCDR2 (SEQ ID NO: 131) and vlCDR3 (SEQ ID NO: 132) sequences of FIG. 2H (66692);
[0032] xxii. the vhCDR1 (SEQ ID NO: 135), vhCDR2 (SEQ ID NO: 136), vhCDR3 (SEQ ID NO: 137), vlCDR1 (SEQ ID NO: 140), vlCDR2 (SEQ ID NO: 141) and vlCDR3 (SEQ ID NO: 142) sequences of FIG. 2I (71710);
[0033] xxiii. the vhCDR1 (SEQ ID NO: 145), vhCDR2 (SEQ ID NO: 146), vhCDR3 (SEQ ID NO: 147), vlCDR1 (SEQ ID NO: 150), vlCDR2 (SEQ ID NO: 151) and vlCDR3 (SEQ ID NO: 152) sequences of FIG. 2J (71717);
[0034] xxiv. the vhCDR1 (SEQ ID NO: 155), vhCDR2 (SEQ ID NO: 156), vhCDR3 (SEQ ID NO: 157), vlCDR1 (SEQ ID NO: 160), vlCDR2 (SEQ ID NO: 161) and vlCDR3 (SEQ ID NO: 162) sequences of FIG. 2K (71739);
[0035] xxv. the vhCDR1 (SEQ ID NO: 165), vhCDR2 (SEQ ID NO: 166), vhCDR3 (SEQ ID NO: 167), vlCDR1 (SEQ ID NO: 170), vlCDR2 (SEQ ID NO: 171) and vlCDR3 (SEQ ID NO: 172) sequences of FIG. 2L (71736);
[0036] xxvi. the vhCDR1 (SEQ ID NO: 175), vhCDR2 (SEQ ID NO: 176), vhCDR3 (SEQ ID NO: 177), vlCDR1 (SEQ ID NO: 180), vlCDR2 (SEQ ID NO: 181) and vlCDR3 (SEQ ID NO: 182) sequences of FIG. 2M (71707);
[0037] xxvii. the vhCDR1 (SEQ ID NO: 185), vhCDR2 (SEQ ID NO: 186), vhCDR3 (SEQ ID NO: 187), vlCDR1 (SEQ ID NO: 190), vlCDR2 (SEQ ID NO: 191) and vlCDR3 (SEQ ID NO: 192) sequences of FIG. 2N (66716);
[0038] xxviii. the vhCDR1 (SEQ ID NO: 195), vhCDR2 (SEQ ID NO: 196), vhCDR3 (SEQ ID NO: 197), vlCDR1 (SEQ ID NO: 200), vlCDR2 (SEQ ID NO: 201) and vlCDR3 (SEQ ID NO: 202) sequences of FIG. 2O (71728);
[0039] xxix. the vhCDR1 (SEQ ID NO: 205), vhCDR2 (SEQ ID NO: 206), vhCDR3 (SEQ ID NO: 207), vlCDR1 (SEQ ID NO: 210), vlCDR2 (SEQ ID NO: 211) and vlCDR3 (SEQ ID NO: 212) sequences of FIG. 2P (71741);
[0040] xxx. the vhCDR1 (SEQ ID NO: 215), vhCDR2 (SEQ ID NO: 216), vhCDR3 (SEQ ID NO: 217), vlCDR1 (SEQ ID NO: 220), vlCDR2 (SEQ ID NO: 221) and vlCDR3 (SEQ ID NO: 222) sequences of FIG. 2Q (71742);
[0041] xxxi. the vhCDR1 (SEQ ID NO: 225), vhCDR2 (SEQ ID NO: 226), vhCDR3 (SEQ ID NO: 227), vlCDR1 (SEQ ID NO: 230), vlCDR2 (SEQ ID NO: 231) and vlCDR3 (SEQ ID NO: 232) sequences of FIG. 2R (71744);
[0042] xxxii. the vhCDR1 (SEQ ID NO: 235), vhCDR2 (SEQ ID NO: 236), vhCDR3 (SEQ ID NO: 237), vlCDR1 (SEQ ID NO: 240), vlCDR2 (SEQ ID NO: 241) and vlCDR3 (SEQ ID NO: 242) sequences of FIG. 2S (71753); and
[0043] xxxiii. the vhCDR1 (SEQ ID NO: 245), vhCDR2 (SEQ ID NO: 246), vhCDR3 (SEQ ID NO: 247), vlCDR1 (SEQ ID NO: 250), vlCDR2 (SEQ ID NO: 251) and vlCDR3 (SEQ ID NO: 252) sequences of FIG. 2T (71755).

[0044] In some embodiments, the composition comprises and an antibody, wherein the antibody comprises the heavy chain variable domain and the light chain variable domain of an antibody selected from the group consisting of:
[0045] i. the heavy chain variable domain (SEQ ID NO: 54 and the light chain variable domain (SEQ ID NO: 59) of FIG. 2A (71709);
[0046] ii. the heavy chain variable domain (SEQ ID NO: 64 and the light chain variable domain (SEQ ID NO: 69) of FIG. 2B (71719);
[0047] iii. the heavy chain variable domain (SEQ ID NO: 74 and the light chain variable domain (SEQ ID NO: 79) of FIG. 2C (71720);
[0048] iv. the heavy chain variable domain (SEQ ID NO: 84 and the light chain variable domain (SEQ ID NO: 89) of FIG. 2D (71722);
[0049] v. the heavy chain variable domain (SEQ ID NO: 94 and the light chain variable domain (SEQ ID NO: 99) of FIG. 2E (71701);
[0050] vi. the heavy chain variable domain (SEQ ID NO: 104 and the light chain variable domain (SEQ ID NO: 109) of FIG. 2F (71663);
[0051] vii. the heavy chain variable domain (SEQ ID NO: 114 and the light chain variable domain (SEQ ID NO: 119) of FIG. 2G (71662);
[0052] viii. the heavy chain variable domain (SEQ ID NO: 124 and the light chain variable domain (SEQ ID NO: 129) of FIG. 2H (66692);
[0053] ix. the heavy chain variable domain (SEQ ID NO: 134 and the light chain variable domain (SEQ ID NO: 139) of FIG. 2I (71710);
[0054] x. the heavy chain variable domain (SEQ ID NO: 144 and the light chain variable domain (SEQ ID NO: 149) of FIG. 2J (71717);
[0055] xi. the heavy chain variable domain (SEQ ID NO: 154 and the light chain variable domain (SEQ ID NO: 159) of FIG. 2K (71739);
[0056] xii. the heavy chain variable domain (SEQ ID NO: 164 and the light chain variable domain (SEQ ID NO: 169) of FIG. 2L (71736);
[0057] xiii. the heavy chain variable domain (SEQ ID NO: 174 and the light chain variable domain (SEQ ID NO: 179) of FIG. 2M (71707);
[0058] xiv. the heavy chain variable domain (SEQ ID NO: 184 and the light chain variable domain (SEQ ID NO: 189) of FIG. 2N (66716);
[0059] xv. the heavy chain variable domain (SEQ ID NO: 194 and the light chain variable domain (SEQ ID NO: 199) of FIG. 2O (71728);
[0060] xvi. the heavy chain variable domain (SEQ ID NO: 204 and the light chain variable domain (SEQ ID NO: 209) of FIG. 2P (71741);
[0061] xvii. the heavy chain variable domain (SEQ ID NO: 214 and the light chain variable domain (SEQ ID NO: 219) of FIG. 2Q (71742);
[0062] xviii. the heavy chain variable domain (SEQ ID NO: 224 and the light chain variable domain (SEQ ID NO: 229) of FIG. 2R (71744);
[0063] xix. the heavy chain variable domain (SEQ ID NO: 234 and the light chain variable domain (SEQ ID NO: 239) of FIG. 2S (71753); and
[0064] xx. the heavy chain variable domain (SEQ ID NO: 244 and the light chain variable domain (SEQ ID NO: 249) of FIG. 2T (71755).

[0065] In some embodiments, the antibody comprises a CH1-hinge-CH2-CH3 region from human IgG1, IgG2, IgG3, or IgG4, wherein said hinge region optionally comprises mutations.

[0066] In some embodiments, the antibody comprises the CH1-hinge-CH2-CH3 region from human IgG4.

[0067] In some embodiments, the hinge region comprises mutations.

[0068] In some embodiments, the antibody comprises a CL region of human kappa 2 light chain.

[0069] In some embodiments, the antibody comprises a CL region of human lambda 2 light chain.

[0070] In some embodiments, the antibody comprises:
[0071] i. a heavy chain variable domain, comprising:
   [0072] a) CDR-H1 having the sequence Y-T-F-X-X2-Y-A-X3-H, wherein X is N, R, D, G or K; X2 is S, H, I or Q; X3 is M or V;
   [0073] b) CDR-H2 having the sequence W-I-H-A-G-T-G-X-T-X2-Y-S-Q-K-F-Q-G, wherein X is N, A or V; X2 is K or LW-I-H; and
   [0074] c) CDR-H3 having the sequence A-R-G-L-G-X-V-G-P-T-G-T-S-W-F-D-P, wherein X is S or E; and
[0075] ii. a light chain variable domain, comprising:
   [0076] a) CDR-L1 having the sequence R-A-S-Q-G-I-S-S-W-L-A;
   [0077] b) CDR-L2 having the sequence E-A-S-S-L-E-S; and
   [0078] c) CDR-L3 having the sequence Q-Q-Y-R-X-X2-P-F-T, wherein X is S, V, Y, L or Q; X2 is F, S or G.

[0079] In some embodiments, the antibody comprises:
[0080] i. a heavy chain variable domain, comprising:
   [0081] a) CDR-H1 having the sequence G-T-F-X-X2-Y-X3-I-S, wherein X is S or N; X2 is E or S; X3 is V or P
   [0082] b) CDR-H2 having the sequence G-I-I-P-G-A-G-T-A-X-Y-A-Q-K-F-Q-G, wherein X is N or IG-I-I-P-X-X2-G-X3-A-X4-Y-A-Q-K-F-Q-G, wherein X is G or I; X2 is S or A; X3 is T or S, X4 is N or I; and
   [0083] c) CDR-H3 having the sequence A-R-G-R-H-X-H-E-T, wherein X is S, or F; and
[0084] ii. a light chain variable domain, comprising:
   [0085] a) CDR-L1 having the sequence R-A-S-Q-G-I-S-S-W-L-A;
   [0086] b) CDR-L2 having the sequence A-A-S-S-L-Q-S; and
   [0087] c) CDR-L3 having the sequence Q-Q-V-Y-X-X2-P-W-T, wherein X is S or R; X2 is L or FQ-.

[0088] In some embodiments, the antibody comprises:
[0089] i. a heavy chain variable domain, comprising:
   [0090] a) CDR-H1 having the sequence F-T-F-X-N-X2-A-M-SF-T-F-X-N-X2-X3-M-S, wherein X is G or D or S; X2 is T or V or Y;
   [0091] b) a CDR-H2 having the sequence A-I-S-X-X1-X2-G-S-T-Y-Y-A-D-S-V-K-GA-I-S-A-N-A-G-S-T-Y-Y-A-D-S-V-K-G, wherein X is G or A; X2 is N or S; X3 is A or G; and
   [0092] c) a CDR-H3 having the sequence A-K-G-P-D-R-Q-V-F-D-Y; and
[0093] ii. a light chain variable domain, comprising:
   [0094] a) a CDR-L1 having the sequence R-A-S-Q-G-I-X-S-W-L-A, wherein X is S or D;
   [0095] b) a CDR-L2 having the sequence A-A-S-S-L-Q-S; and
   [0096] c) a CDR-L3 having the sequence Q-H-A-X-X1-F-P-Y-TQ-H-A-L-X-F-P-Y-T, wherein X is Y or L; X1 is S or F.

[0097] In some embodiments, the antibody comprises:
[0098] i. a heavy chain variable domain, comprising:
   [0099] a) CDR-H1 having the sequence G-S-I-S-S-X-X2-Y-X3-W-G, wherein X is S or P; X2 is E or D; X3 is G, Y, or P;
   [0100] b) CDR-H2 having the sequence S-I-X-X2-X3-G-X4-T-Y-Y-N-P-S-L-K-S, wherein X is Y or V; X2 is Y or N; X3 is Q or S; X4 is S or A; and
   [0101] c) CDR-H3 having the sequence A-R-G-P-X-R-Q-X2-F-D-Y, wherein X is Y or H, X2 is V or L; and
[0102] ii. a light chain variable domain, comprising:
   [0103] a) CDR-L1 having the sequence R-A-S-Q-G-I-S-S-W-L-A;
   [0104] b) CDR-L2 having the sequence A-A-S-S-L-Q-S; and
   [0105] c) CDR-L3 having the sequence Q-Q-G-X-X2-F-P-Y-T, wherein X is S or F; X2 is S or V.

[0106] In some embodiments, the antibody comprises:
[0107] i. a heavy chain variable domain, comprising:
   [0108] a) CDR-H1 having the sequence Y-T-F-X-X2-Y-A-X3-H, wherein X is any amino acid; X2 is any amino acid; X3 is any amino acid;
   [0109] b) CDR-H2 having the sequence W-I-H-A-G-T-G-X-T-X2-Y-S-Q-K-F-Q-G, wherein X is any amino acid; X2 is any amino acid; and
   [0110] c) CDR-H3 having the sequence A-R-G-L-G-X-V-G-P-T-G-T-S-W-F-D-P, wherein X is any amino acid; and
[0111] ii. a light chain variable domain, comprising:
   [0112] a) CDR-L1 having the sequence R-A-S-Q-G-I-S-S-W-L-A;
   [0113] b) CDR-L2 having the sequence E-A-S-S-L-E-S; and
   [0114] c) CDR-L3 having the sequence Q-Q-Y-R-X-X2-P-F-T, wherein X is any amino acid; X2 is any amino acid.

[0115] In some embodiments, the antibody comprises:
[0116] i. a heavy chain variable domain, comprising:
   [0117] a) CDR-H1 having the sequence G-T-F-X-X2-Y-X3-I-S, wherein X is any amino acid; X2 is any amino acid; X3 is any amino acid;
   [0118] b) CDR-H2 having the sequence G-I-I-P-G-X2-G-T-A-X3-Y-A-Q-K-F-Q-G, wherein X is G or Y, X2 is A or S; X3 is N, I or V; and
   [0119] c) CDR-H3 having the sequence A-R-G-R-H-X-H-E-T, wherein X is any amino acid; and
[0120] ii. a light chain variable domain, comprising:
   [0121] a) CDR-L1 having the sequence R-A-S-Q-G-I-S-S-W-L-A;
   [0122] b) CDR-L2 having the sequence A-A-S-S-L-Q-S; and
   [0123] c) CDR-L3 having the sequence Q-Q-V-Y-X-X2-P-W-T, wherein X is any amino acid; X2 is any amino acid.

[0124] In some embodiments, the antibody comprises:
[0125] i. a heavy chain variable domain, comprising:
   [0126] a) CDR-H1 having the sequence F-T-F-X-N-X2-A-M-S, wherein X is any amino acid; X2 is any amino acid;
   [0127] b) CDR-H2 having the sequence A-I-S-X-X1-X2-G-S-T-Y-Y-A-D-S-V-K-G, wherein X is any amino acid; X2 is any amino acid; X3 is any amino acid; and
   [0128] c) CDR-H3 having the sequence A-K-G-P-D-R-Q-V-F-D-Y;
[0129] ii. a light chain variable domain, comprising:
   [0130] a) CDR-L1 having the sequence R-A-S-Q-G-I-X-S-W-L-A, wherein X is any amino acid;
   [0131] b) CDR-L2 having the sequence A-A-S-S-L-Q-S; and
   [0132] c) CDR-L3 having the sequence Q-H-A-X-X1-F-P-Y-T, wherein X is any amino acid; X2 is any amino acid.

[0133] In some embodiments, the antibody comprises:
[0134] i. a heavy chain variable domain, comprising:
   [0135] a) CDR-H1 having the sequence G-S-I-S-S-X-X2-Y-X3-W-G, wherein X is any amino acid; X2 is any amino acid; X3 is any amino acid;
   [0136] b) CDR-H2 having the sequence S-I-X-X2-X3-G-X4-T-Y-Y-N-P-S-L-K-S, wherein X is any amino acid; X2 is any amino acid; X3 is any amino acid; X4 is any amino acid; and
   [0137] c) CDR-H3 having the sequence A-R-G-P-X-R-Q-X2-F-D-Y, wherein X is any amino acid, X2 is any amino acid; and
[0138] ii. a light chain variable domain, comprising:
   [0139] a) CDR-L1 having the sequence R-A-S-Q-G-I-S-S-W-L-A;
   [0140] b) CDR-L2 having the sequence A-A-S-S-L-Q-S; and
   [0141] c) CDR-L3 having the sequence Q-Q-G-X-X2-F-P-Y-T, wherein X is any amino acid; X2 is any amino acid.

[0142] In some embodiments, the antibody comprises:
[0143] i. a heavy chain variable domain, comprising:
   [0144] a) CDR-H1 having the sequence Y-T-F-X-X2-Y-A-X3-H, wherein X is N, R, D, G, T, Q, S, A or K; X2 is S, H, I, N, L, Y or Q; X3 is M or V;
   [0145] b) CDR-H2 having the sequence X-I-X2-A-G-X3-X4-X5-T-X6-Y-S-Q-K-F-Q-G, wherein X is W or Y; X2 is H or N; X3 is S, T or A; X4 is G or A; X5 is N, A, Tor V; X6 is E, K or L; and
   [0146] c) CDR-H3 having the sequence A-R-G-L-G-X-V-G-P-T-G-T-S-W-F-D-P, wherein X is S, L, A, K or E; and
[0147] ii. a light chain variable domain, comprising:
   [0148] a) CDR-L1 having the sequence R-A-S-Q-G-I-S-S-W-L-A;
   [0149] b) CDR-L2 having the sequence E-A-S-S-E-S, wherein X is L or S; and
   [0150] c) CDR-L3 having the sequence Q-Q-Y-R-X-X2-P-F-T, wherein X is S, V, Y, L, T or Q; X2 is F, S, Y or G.

[0151] In some embodiments, the antibody comprises:
[0152] i. a heavy chain variable domain, comprising:
   [0153] a) CDR-H1 having the sequence G-T-F-X-X2-Y-X3-I-S, wherein X is S or N; X2 is E or S; X3 is V or P
[0154] b) CDR-H2 having the sequence G-I-I-P-X-X2-G-T-A-X3-Y-A-Q-K-F-Q-G, wherein X is G, S, I or Y; X2 is A, V or S; X3 is N, I or V; and
   [0155] c) CDR-H3 having the sequence A-R-G-R-H-X-H-E-T, wherein X is S, G, or F; and
[0156] ii. a light chain variable domain, comprising:
   [0157] a) CDR-L1 having the sequence R-A-S-Q-G-I-S-S-W-L-A;
   [0158] b) CDR-L2 having the sequence A-A-S-S-L-Q-S; and
   [0159] c) CDR-L3 having the sequence Q-Q-X-Y-X2-X3-P-W-T, wherein X is V or L; X2 is S or R; X3 is L, I or F.

[0160] In some embodiments, the antibody comprises:
[0161] i. a heavy chain variable domain, comprising:
   [0162] a) CDR-H1 having the sequence F-T-F-X-X2-X3-X4-M-S, wherein X is G, S, P or D or S; X2 is N, S or P; X3 is T, V or Y; X4 is A, H or I;
   [0163] b) a CDR-H2 having the sequence A-I-S-X-X2-X3-X4-X5-T-X6-Y-A-D-S-V-K-G, wherein X is G or A; X2 is N, T, E or S; X3 is A or G; X4 is A or G; X5 is S or G; X6 is Y or F; and
   [0164] c) a CDR-H3 having the sequence A-K-G-P-D-R-Q-V-F-D-Y; and
[0165] ii. a light chain variable domain, comprising:
   [0166] a) a CDR-L1 having the sequence R-A-S-Q-G-I-X-S-W-L-A, wherein X is S or D;
   [0167] b) a CDR-L2 having the sequence A-A-S-S-L-Q-S; and
   [0168] c) a CDR-L3 having the sequence Q-H-X-X2-X3-F-P-Y-T, wherein X is A or G; X2 is Y, R or L; X3 is S, R, L or F.

[0169] In some embodiments, the antibody comprises:
[0170] i. a heavy chain variable domain, comprising:
   [0171] a) CDR-H1 having the sequence G-S-I-X-S-X2-X3-Y-X4-W-X5, wherein X is S or F; X2 is S or P; X3 is E or D; X4 is G, P or Y; X5 is G or S;
   [0172] b) CDR-H2 having the sequence X-I-X2-X3-X4-G-X5-T-Y-Y-N-P-S-L-K-S, wherein X is S or V; X2 is Y, V, F or A; X3 is Y, F or N; X4 is Q, A or S; X5 is S, A or N; and
   [0173] c) CDR-H3 having the sequence A-R-G-P-X-R-Q-X2-F-D-Y, wherein X is Y, H or F; X2 is V or L; and
[0174] ii. a light chain variable domain, comprising:
   [0175] a) CDR-L1 having the sequence R-A-S-Q-G-I-S-S-W-L-A;
   [0176] b) CDR-L2 having the sequence A-A-S-S-L-Q-S; and
   [0177] c) CDR-L3 having the sequence Q-Q-G-X-X2-F-P-Y-T, wherein X is S N, W or F; X2 is S or V.

[0178] In some embodiments, the antibody comprises:
[0179] i) the vhCDR1), vhCDR2, and vhCDR3 from VH1-03.66650, VH1-69.66670, VH3-23.66692, or VH1-39.66716; and
[0180] ii) the vlCDR1), vlCDR2, and vlCDR3 from VH1-03.66650, VH1-69.66670, VH3-23.66692, or VH1-39.66716. the vlCDR1), vlCDR2, and vlCDR3 from VH1-03.66650, VH1-69.66670, VH3-23.66692, or VH1-39.66716.

[0181] In some embodiments, the antibody comprises:
[0182] i) the vhCDR1), vhCDR2, and vhCDR3 from VH1-03.66650, VH1-69.66670, VH3-23.66692, VH1-39.66716, ADI-71663, ADI-71662, ADI-66692, ADI-71701, ADI-71709, ADI-71710, ADI-71707, ADI-71717, ADI-71719, ADI-71220, ADI-71722, ADI-71736, ADI-71739, ADI-71728, ADI-66716, ADI-71741, ADI-71742, ADI-71744, ADI-71753, or ADI-71755; and
[0183] ii) the vlCDR1), vlCDR2, and vlCDR3 from VL-kappa-1-5, VL-kappa-1-12, ADI-71663, ADI-71662, ADI-66692, ADI-71701, ADI-71709, ADI-71710, ADI-71707, ADI-71717, ADI-71719, ADI-71220, ADI-71722, ADI-71736, ADI-71739, ADI-71728, ADI-66716, ADI-71741, ADI-71742, ADI-71744, ADI-71753, or ADI-71755;
[0184] wherein optionally the CDRs comprise from 0 to 4 substitutions and wherein no individual CDR comprises more than 1 substitution, and wherein the vhCDR3 and vlCDR3 comprise no substitutions.

[0185] In some embodiments, the anti-IL18-BP antibody comprises:
[0186] i) a heavy chain variable domain comprising a sequence exhibiting at least 90%, at least 95%, or at least 98% identity to the heavy chain variable domain from ADI-71663, ADI-71662, ADI-66692, ADI-71701, ADI-71709, ADI-71710, ADI-71707, ADI-71717, ADI-71719, ADI-71220, ADI-71722, ADI-71736, ADI-71739, ADI-71728, ADI-66716, ADI-71741, ADI-71742, ADI-71744, ADI-71753, or ADI-71755, wherein each individual vhCDR comprises no more than 1 substitution, and wherein the vhCDR3 comprises no substitutions, and
[0187] ii) a light chain variable domain comprising a sequence exhibiting at least 90%, at least 95%, or at least 98% identity to the light chain variable domain from ADI-71663, ADI-71662, ADI-66692, ADI-71701, ADI-71709, ADI-71710, ADI-71707, ADI-71717, ADI-71719, ADI-71220, ADI-71722, ADI-71736, ADI-71739, ADI-71728, ADI-66716, ADI-71741, ADI-71742, ADI-71744, ADI-71753, or ADI-71755, wherein each individual vlCDR comprises no more than 1 substitution, and wherein the vlCDR3 comprises no substitutions.

[0188] In some embodiments, the anti IL18-BP antibody comprises:
[0189] i) a heavy chain variable domain comprising the vhCDR1), vhCDR2, and vhCDR3 from ADI-71663, ADI-71662, ADI-66692, ADI-71701, ADI-71709, ADI-71710, ADI-71707, ADI-71717, ADI-71719, ADI-71220, ADI-71722, ADI-71736, ADI-71739, ADI-71728, ADI-66716, ADI-71741, ADI-71742, ADI-71744, ADI-71753, or ADI-71755, and wherein said heavy chain variable domain comprises a sequence exhibiting at least 90% identity to the heavy chain variable domain from, ADI-71663, ADI-71662, ADI-66692, ADI-71701, ADI-71709, ADI-71710, ADI-71707, ADI-71717, ADI-71719, ADI-71220, ADI-71722, ADI-71736, ADI-71739, ADI-71728, ADI-66716, ADI-71741, ADI-71742, ADI-71744, ADI-71753, or ADI-71755, wherein each individual vhCDR comprises no more than 1 substitution, and wherein the vhCDR3 comprises no substitutions, and
[0190] ii) a light chain variable domain comprising the vlCDR1), vlCDR2, and vlCDR3 from ADI-71663, ADI-71662, ADI-66692, ADI-71701, ADI-71709, ADI-71710, ADI-71707, ADI-71717, ADI-71719, ADI-71220, ADI-71722, ADI-71736, ADI-71739, ADI-71728, ADI-66716, ADI-71741, ADI-71742, ADI-71744, ADI-71753, or ADI-71755, and wherein said light chain variable domain comprises a sequence exhibiting at least 90% identity to the light chain variable domain from ADI-71663, ADI-71662, ADI-66692, ADI-71701, ADI-71709, ADI-71710, ADI-71707, ADI-71717, ADI-71719, ADI-71220, ADI-71722, ADI-71736, ADI-71739, ADI-71728, ADI-66716, ADI-71741, ADI-71742, ADI-71744, ADI-71753, or ADI-71755, wherein each individual vlCDR comprises no more than 1 substitution, and wherein the vlCDR3 comprises no substitutions.

[0191] In some embodiments, the antibody comprises the heavy chain variable domain from ADI-71663, ADI-71662, ADI-66692, ADI-71701, ADI-71709, ADI-71710, ADI-71707, ADI-71717, ADI-71719, ADI-71220, ADI-71722, ADI-71736, ADI-71739, ADI-71728, ADI-66716, ADI-71741, ADI-71742, ADI-71744, ADI-71753, or ADI-71755, and the light chain variable domain from, ADI-71663, ADI-71662, ADI-66692, ADI-71701, ADI-71709, ADI-71710, ADI-71707, ADI-71717, ADI-71719, ADI-71220, ADI-71722, ADI-71736, ADI-71739, ADI-71728, ADI-66716, ADI-71741, ADI-71742, ADI-71744, ADI-71753, or ADI-71755.

[0192] In some embodiments, the antibody comprises the CH1-hinge-CH2-CH3 region from human IgG4.

[0193] In some embodiments, the hinge region comprises mutations.

[0194] In some embodiments, the antibody comprises a CL region of human kappa 2 light chain.

[0195] In some embodiments, the antibody comprises a CL region of human lambda 2 light chain.

[0196] In some embodiments, the antibody comprises:
[0197] a) a heavy chain variable domain comprising a vhCDR1, a vhCDR2, and a vhCDR3 from an antibody selected from the group consisting of VH1-03.66650, VH1-69.66670, VH3-23.66692, VH1-39.66716, ADI-71663, ADI-71662, ADI-66692, ADI-71701, ADI-71709, ADI-71710, ADI-71707, ADI-71717, ADI-71719, ADI-71220, ADI-71722, ADI-71736, ADI-71739, ADI-71728, ADI-66716, ADI-71741, ADI-71742, ADI-71744, ADI-71753, or ADI-71755, and
[0198] b) a light chain variable domain comprising a vlCDR1, a vlCDR2, and a vlCDR3 from an antibody selected from the group consisting of VL-kappa-1-5, VL-kappa-1-12, ADI-71663, ADI-71662, ADI-66692, ADI-71701, ADI-71709, ADI-71710, ADI-71707, ADI-71717, ADI-71719, ADI-71220, ADI-71722, ADI-71736, ADI-71739, ADI-71728, ADI-66716, ADI-71741, ADI-71742, ADI-71744, ADI-71753, or ADI-71755.

[0199] In some embodiments, the antibody comprises:
[0200] a) a heavy chain variable domain comprising a vhCDR1, a vhCDR2, and a vhCDR3 from an antibody selected from the group consisting of VH1-03.66650, VH1-69.66670, VH3-23.66692, VH1-39.66716, ADI-71663, ADI-71662, ADI-66692, ADI-71701, ADI-71709, ADI-71710, ADI-71707, ADI-71717, ADI-71719, ADI-71220, ADI-71722, ADI-71736, ADI-71739, ADI-71728, ADI-66716, ADI-71741, ADI-71742, ADI-71744, ADI-71753, or ADI-71755, and
[0201] b) a light chain variable domain comprising a vlCDR1, a vlCDR2, and a vlCDR3 from an antibody selected from the group consisting of VL-kappa-1-5, VL-kappa-1-12, ADI-71663, ADI-71662, ADI-66692, ADI-71701, ADI-71709, ADI-71710, ADI-71707, ADI-71717, ADI-71719, ADI-71220, ADI-71722, ADI-71736, ADI-71739, ADI-71728, ADI-66716, ADI-71741, ADI-71742, ADI-71744, ADI-71753, or ADI-71755; and
[0202] optionally, 1) wherein each CDR individually comprises from 0 to 4 substitutions and wherein no individual CDR comprises more than 1 substitution, and wherein the vhCDR3) and vlCDR3 comprise no substitutions, 2) wherein each CDR individually comprises 1 substitution, or 3) wherein each individual vhCDR comprises no more than 1 substitution, and wherein the vhCDR3 comprises no substitutions.

[0203] In some embodiments, the antibody comprises a CH1-hinge-CH2-CH3 region from human IgG1, IgG2, IgG3, or IgG4, wherein said hinge region optionally comprises mutations.

[0204] In some embodiments, the antibody comprises the CH1-hinge-CH2-CH3 region from human IgG4.

[0205] In some embodiments, the hinge region comprises mutations.

[0206] In some embodiments, the antibody comprises a CL region of human kappa 2 light chain.

[0207] In some embodiments, the antibody comprises a CL region of human lambda 2 light chain.

[0208] In some embodiments, the antibody competes for binding with an antibody recited in any one of the preceding claims.

[0209] The present invention also provides for methods of treating cancer in a patient, comprising administering an anti-IL18-BP antibody according to any of the preceding claims, and wherein said cancer is treated.

[0210] The present invention also provides for methods of treating cancer in a patient, comprising administering an anti-IL18-BP antibody, wherein said anti-IL18-BP antibody activates T cells, NK cells, NKT cells, Dendritic cells, MAIT T cells, γδ T cells, and/or innate lymphoid cells (ILCs), and/or modulates Myeloid cells, and wherein said cancer is treated.

[0211] The present invention also provides for methods of activating T-cells of a patient comprising administering an anti-IL18-BP antibody according to any of the preceding claims, and wherein said T-cells are activated.

[0212] The present invention also provides for methods of activating NK-cells of a patient comprising administering an anti-IL18-BP antibody according to any of the preceding claims, and wherein said NK-cells are activated.

[0213] The present invention also provides for methods of activating NKT-cells of a patient comprising administering an anti-IL18-BP antibody according to any of the preceding claims, and wherein said NKT-cells are activated.

[0214] The present invention also provides for methods of modulating myeloid cells of a patient comprising administering an anti-IL18-BP antibody according to any of the preceding claims, and wherein said myeloid cells are modulated.

[0215] The present invention also provides for methods of activating dendritic cells of a patient comprising administering an anti-IL18-BP antibody according to any of the preceding claims, and wherein said dendritic cells are activated.

[0216] The present invention also provides for methods of activating dendritic cells of a patient comprising administering an anti-IL18-BP antibody according to any of the preceding claims, and wherein said MAIT T cells are activated,

[0217] The present invention also provides for methods of activating dendritic cells of a patient comprising administering an anti-IL18-BP antibody according to any of the preceding claims, and wherein said γδ T cells are activated.

[0218] The present invention also provides for methods of activating ILC cells of a patient comprising administering an anti-IL18-BP antibody according to any of the preceding claims, and wherein said ILC cells are activated.

[0219] The present invention also provides for methods of increasing IL-18 mediated immuno-stimulating activity in the tumor microenvironment (TME), and/or lymph nodes, comprising administering an anti-IL18-BP antibody, wherein said anti-IL18-BP antibody increases IL-18 mediated immuno-stimulating activity in the TME, and/or lymph nodes.

[0220] The present invention also provides for methods of restoring IL-18 activity on T cells, NK cells, NKT cells, Myeloid cells, Dendritic cells, MAIT T cells, γδ T cells, and/or innate lymphoid cells (ILCs), comprising administering an anti-IL18-BP antibody, wherein said anti-IL18-BP antibody restores activity on T cells, NK cells, NKT cells, Myeloid cells, Dendritic cells, MAIT T cells, γδ T cells, and/or innate lymphoid cells (ILCs).

[0221] In some embodiments, the anti-IL18-BP antibody is administered as a stable liquid pharmaceutical formulation.

[0222] In some embodiments, the T-cells are cytotoxic T-cells (CTLs).

[0223] The present invention also provides for methods according to claim 47, wherein said T-cells are selected from the group consisting of CD4⁺ T-cells and CD8⁺ T-cells.

[0224] In some embodiments, the subject for treatment comprises an increase in tumor growth inhibition of at least about 10%, 20%, 30%, 40%, 50%, 60%, 70%, 80%, 90%, 100%, 125%, 150%, 175%, 200%, 225%, 250%, 275%, 300%, 325%, 350%, 375%, 400%, 425%, 450%, 475%, 500%, 525%, 550%, 575%, 600%, 625%, 650%, 675%, 700%, 725%, 750%, 775%, 800%, 825%, 850%, 875%, 900%, 925%, 950%, 975%, or 1000%, as compared to a control or an untreated patient.

[0225] The method of treatment according to any one of claims 40-54, wherein the subject for treatment exhibits a decrease in tumor growth of at least about 10%, 20%, 30%, 40%, 50%, 60%, 70%, 80%, 90%, 100%, 125%, 150%, 175%, 200%, 225%, 250%, 275%, 300%, 325%, 350%, 375%, 400%, 425%, 450%, 475%, 500%, 525%, 550%, 575%, 600%, 625%, 650%, 675%, 700%, 725%, 750%, 775%, 800%, 825%, 850%, 875%, 900%, 925%, 950%, 975%, or 1000%, as compared to a control or an untreated patient.

[0226] The present invention also provides for method as described herein, wherein the NK-cells are CD16+ lymphocytes.

[0227] The present invention also provides for method as described herein, wherein the NK-cells are CD56+ NK cells.

[0228] The present invention also provides for method as described herein, wherein the activation is measured as an increase in expression of one or more activation makers.

[0229] The present invention also provides for method as described herein, wherein the activation markers are selected from the group consisting of CD107a, CD137, CD69, granzyme, and perforin.

[0230] The present invention also provides for method as described herein, wherein the activation is measured as an increase in proliferation of said NK-cells.

[0231] The present invention also provides for method as described herein, wherein the activation is measured as an increase in secretion of one or more cytokines.

[0232] The present invention also provides for method as described herein, wherein the one or more cytokines is selected from the group consisting of IFNγ, TNF, GMCSF, MIG (CXCL9, IP-10 (CXCL10 and MCP1 (CCL2).

[0233] The present invention also provides for method as described herein, wherein the activation is measured as an increase in direct killing of target cells.

[0234] In some embodiments, the method further comprises administering a second antibody.

[0235] In some embodiments, the second antibody is an antibody that binds to and/or inhibits a human checkpoint receptor protein.

[0236] In some embodiments, the second antibody is selected from the group consisting of an anti-PVRIG antibody, an anti-PD-1 antibody, an anti-PD-L1 antibody, an anti-TIGIT antibody, an anti-CTLA-4 antibody, an anti-PD-L2 antibody, an anti-B7-H3 antibody, an anti B7-H4 antibody, an anti-CEACAM-1 antibody, an anti-PVR antibody, an anti-LAG3 antibody, an anti-CD112 antibody, an anti-CD96 antibody, an anti-TIM3 antibody, an anti-BTLA antibody, an anti-ICOS antibody, an anti-OX40 antibody, or an anti-41BB antibody, an anti-CD27 antibody, or an anti-GITR antibody.

[0237] In some embodiments, the PVRIG antibody is selected from the group consisting of CHA.7.518.1.H4(S241P) and CHA.7.538.1.2.H4(S241P).

[0238] In some embodiments, the anti-PVRIG antibody comprises: i) a heavy chain variable domain comprising the vhCDR1), vhCDR2, and vhCDR3 from CHA.7.518.1.H4(S241P) (SEQ ID NO:260 and ii) a light chain variable domain comprising the vlCDR1), vlCDR2, and vlCDR3 from CHA.7.518.1.H4(S241P) (SEQ ID NO:265).

[0239] In some embodiments, the anti-PVRIG antibody comprises: i) a heavy chain variable domain comprising the vhCDR1), vhCDR2, and vhCDR3 from CHA.7.538.1.2.H4(S241P) (SEQ ID NO:270 and ii) a light chain variable domain comprising the vlCDR1), vlCDR2, and vlCDR3 from CHA.7.538.1.2.H4(S241P) (SEQ ID NO:275).

[0240] In some embodiments, the anti-PVRIG antibody comprises: i) a heavy chain variable domain comprising the vhCDR1), vhCDR2, and vhCDR3 from CHA. 7.518.4 (SEQ ID NO: 1453; FIG. 36AG) and ii) a light chain variable domain comprising the vlCDR1, vlCDR2, and vlCDR3 from CHA.7.518.4 (SEQ ID NO:1457; FIG. 36AG).

[0241] In some embodiments, the anti-PVRIG antibody is selected from the group consisting of GSK4381562/SRF816 (GSK/Surface), NTX2R13 (Nectin Therapeutics), an anti-PVRIG antibody as described in WO 2017/041004, an anti-PVRIG antibody as described in WO 2001/008879, an anti-PVRIG antibody as described in WO 2018/017864, and an anti-PVRIG antibody as described in WO 2118/000205.

[0242] In some embodiments, the anti-TIGIT antibody is selected from the group consisting of CPA.9.083.H4(S241P) and CPA.9.086.H4(S241P).

[0243] In some embodiments, the anti-TIGIT antibody comprises: i) a heavy chain variable domain comprising the vhCDR1), vhCDR2, and vhCDR3 from CPA.9.083.H4(S241P) (SEQ ID NO: 350 and ii) a light chain variable domain comprising the vlCDR1), vlCDR2, and vlCDR3 from CPA.9.083.H4(S241P) (SEQ ID NO:355).

[0244] In some embodiments, the anti-TIGIT antibody comprises: i) a heavy chain variable domain comprising the vhCDR1), vhCDR2, and vhCDR3 from CPA.9.086.H4(S241P) (SEQ ID NO: 360 and ii) a light chain variable domain comprising the vlCDR1), vlCDR2, and vlCDR3 from CPA.9.086.H4(S241P) (SEQ ID NO:365).

[0245] In some embodiments, the anti-TIGIT antibody comprises: i) a heavy chain variable domain comprising the vhCDR1), vhCDR2, and vhCDR3 from CHA.9.547.18 (SEQ ID NO: 1177; FIG. 34QQQQ) and ii) a light chain variable domain comprising the vlCDR1, vlCDR2, and vlCDR3 from CHA.9.547.18 (SEQ ID NO:1181; FIG. 34QQQQ).

[0246] In some embodiments, the anti-TIGIT antibody is selected from the group consisting of EOS-448 (GlaxoSmithKline, iTeos Therapeutics), BMS-986207, domvanalimab (AB154, Arcus Biosciences, Inc.), AB308 (Arcus Bioscience), Ociperlimab (aBGB-A1217, BeiGene), Tiragolumab (MTIG7192A, RocheGenentech), BAT6021 (Bio-Thera Solutions), BAT6005 (Bio-Thera Solutions), IBI939 (Innovent Biologics, US2021/00040201, JS006 (Junshi Bioscience/COHERUS), ASP8374 (Astellas Pharma Inc), Vibostolimab (MK-7684, Merck Sharp & Dohme), M6332 (Merck KGAA), Etigiliimab (OMP-313M32, Mereo BioPharma), SEA-TGT (Seagen) y, HB0030 (Huabo Biopharma), AK127 (AKESO), IBI939 (Innovent Biologics), and anti-TIGIT antibodies include the Genentech antibody (MTIG7192A).

[0247] In some embodiments, the anti-PD-1 antibody is selected from the group consisting of nivolumab (Opdivo®; BMS; CheckMate078, pembrolizumab (KEYTRUDA®; Merck), TSR-042 (Tesaro), cemiplimab (REGN2810; Regeneron Pharmaceuticals, see US20170174779, BMS-936559, Spartalizumab (PDR001, Novartis), pidilizumab (CT-011; Pfizer Inc), Tislelizumab (BGB-A317, BeiGene), Camrelizumab (SHR-1210, Incyte and Jiangsu HengRui), SHR-1210 (CTR20170299 and CTR20170322, SHR-1210 (CTR20160175 and CTR20170090, Sintilimab (Tyvyt®; Eli lily and Innovent Biologics), Toripalimab (JS001, Shanghai Junshi Bioscience), JS-001 (CTR20160274, IBI308 (CTR20160735, BGB-A317 (CTR20160872, Penpulimab (AK105, Akeso Biopharma), Zimberelimab (Arcus), BAT1306 (Bio-Thera Solutions Ltd), Sasanlimab (PF-06801591, pfizer), Dostarlimab-gxly (GlaxoSmithKline LLC), Prolgolimab (Biocad), Cadonilimab (Akeso Inc), Geptanolimab (Genor BioPharma Co Ltd), Serplulimab (Shanghai Henlius Biotech Inc), Balstilimab (Agenus Inc), Retifanlimab (Incyte Corp), Cetrelimab (Johnson & Johnson), CS-1003 (EQRx Inc), IBI-318 (Innovent Biologics Inc), Ivonescimab (Akeso Inc), Pucotenlimab (Lepu Biopharma Co Ltd), QL-1604 (Qilu Pharmaceutical Co Ltd), SCTI-10A (SinoCelltech Group Ltd), Tebotelimab (MacroGenics Inc), AZD-7789 (AstraZeneca Plc), Budigalimab (AbbVie Inc), EMB-02 (EpimAb Biotherapeutics Inc), Ezabenlimab (Boehringer Ingelheim International GmbH), F-520 (Shandong New Time Pharmaceutical Co Ltd), HX-009 (Waterstone Hanxbio Pty Ltd), Zeluvalimab (Amgen), Peresolimab (Eli Lilly and Co), Rosnilimab (AnaptysBio Inc), Vudalimab (Xencor), Izuralimab (Xencor), Lorigerlimab (MacroGenics Inc), YBL-006 (Y-Biologics Inc), and ONO-4685 (Ono Pharmaceutical Co Ltd), LY-3434172 (Eli Lilly and Co).

[0248] In some embodiments, the anti-PD-L1 antibody is selected from the group consisting of atezolizumab (TECENTRIQ®; MPDL3280A; IMpower110; Roche/Genentech), avelumab (BAVENCIOR; MSB001071 8C; EMD Serono & Pfizer), and Durvalumab (MEDI4736; IMFINZI®; AstraZeneca). And other antibodies under development, for example, Lodapolimab (LY3300054, Eli Lily), Pimivalimab (Jounce Therapeutics Inc), SHR-1316 (Jiangsu Hengrui Medicine Co Ltd), Envafolimab (Jiangsu Simcere Pharmaceutical Co Ltd), sugemalimab (CStone Pharmaceuticals Co Ltd), cosibelimab (Checkpoint Therapeutics Inc), pacmilimab (CytomX Therapeutics Inc), IBI-318, IBI-322, IBI-323 (Innovent Biologics Inc), INBRX-105 (Inhibrx Inc), KN-046 (Alphamab Oncology), 6MW-3211 (Mabwell Shanghai Bioscience Co Ltd), BNT-311 (BioNTech SE), FS-118 (F-star Therapeutics Inc), GNC-038 (Systimmune Inc), GR-1405 (Genrix (Shanghai) Biopharmaceutical Co Ltd), HS-636 (Zhejiang Hisun Pharmaceutical Co Ltd), LP-002 (Lepu Biopharma Co Ltd), PM-1003 (Biotheus Inc), PM-8001 (Biotheus Inc), STIA-1015 (ImmuneOncia Therapeutics LLC), ATG-101 (Antengene Corp Ltd), BJ-005 (BJ Bioscience Inc), CDX-527 (Celldex Therapeutics Inc), GNC-035 (Systimmune Inc), GNC-039 (Systimmune Inc), HLX-20 (Shanghai Henlius Biotech Inc), JS-003 (Shanghai Junshi Bioscience Co Ltd), LY-3434172 (Eli Lilly and Co), MCLA-145 (Merus NV), MSB-2311 (Transcenta Holding Ltd), PF-07257876 (Pfizer Inc), Q-1802 (QureBio Ltd), QL-301 (QLSF Biotherapeutics Inc), QLF-31907 (Qilu Pharmaceutical Co Ltd), RC-98 (RemeGen Co Ltd), TST-005 (Transcenta Holding Ltd), Atezolizumab (IMpower133, BMS-936559/MDX-1105, and/or RG-7446/MPDL3280A, and YW243.55.S70.

[0249] In some embodiments, the anti-IL18-BP antibody and the second antibody are administered sequentially or simultaneously, in any order, and in one or more formulations.

[0250] In some embodiments, the anti-IL18-BP antibody is for use in combination with an immunostimulatory antibody, a cytokine therapy, or an immunomodulatory drug, cytotoxic agents, chemotherapeutic agents, growth inhibitory agents, anti-hormonal agents, kinase inhibitors, anti-angiogenic agents, cardioprotectants, immunosuppressive agents, agents that promote proliferation of hematological cells, angiogenesis inhibitors, protein tyrosine kinase (PTK) inhibitors, or other therapeutic agents.

[0251] In some embodiments, the method further comprises administering one or more inflammasome activators.

[0252] In some embodiments, the inflammasome activator is an chemotherapy agent.

[0253] In some embodiments, the chemotherapy agent is selected from the group consisting of Platinum, Paclitaxel (taxol), Sorafenib, Doxorubicin, Sorafenib, 5-FU, Gemcitabine, and Irinotecan (CPT-11).

[0254] In some embodiments, the Platinum chemotherapy agent is Oxaliplatin or Cisplatin.

[0255] In some embodiments, the inflammasome activator is a CD39 inhibitor.

[0256] In some embodiments, the CD39 inhibitor is an anti-CD39 antibody.

[0257] In some embodiments, the cancer is selected from the group consisting of vascularized tumors, melanoma, non-melanoma skin cancer (squamous and basal cell carcinoma), mesothelioma, squamous cell cancer, lung cancer, small-cell lung cancer, non-small cell lung cancer, neuroendocrine lung cancer (including pleural mesothelioma, neuroendocrine lung carcinoma), NSCL (large cell), NSCLC large cell adenocarcinoma, non-small cell lung carcinoma (NSCLC), NSCLC squamous cell, soft-tissue sarcoma, Kaposi's sarcoma, adenocarcinoma of the lung, squamous carcinoma of the lung, NSCLC with PDL1>=50% TPS, neuroendocrine lung carcinoma, a typical carcinoid lung cancer, cancer of the peritoneum, esophageal cancer, hepatocellular cancer, liver cancer (including HCC), gastric cancer, stomach cancer (including gastrointestinal cancer), pancreatic cancer, glioblastoma, cervical cancer, ovarian cancer, urothelial cancer, bladder cancer, hepatoma, glioma, brain cancer (as well as edema, such as that associated with brain tumors), breast cancer (including, for example, triple negative breast cancer), testis cancer, testicular germ cell tumors, colon cancer, colorectal cancer (CRC), colorectal cancer MSS (MSS-CRC); refractory MSS colorectal; MSS (microsatellite stable status), primary peritoneal cancer, primary peritoneal ovarian carcinoma, microsatellite stable primary peritoneal cancer, platinum resistant microsatellite stable primary peritoneal cancer, CRC (MSS unknown), rectal cancer, endometrial cancer (including endometrial carcinoma), uterine carcinoma, salivary gland carcinoma, kidney cancer, renal cell cancer (RCC), renal cell carcinoma (RCC), gastro-esophageal junction cancer, prostate cancer, vulval cancer, thyroid cancer, hepatic carcinoma, carcinoid carcinoma, head and neck cancer, B-cell lymphoma (including non-Hodgkin's lymphoma, as well as low grade/follicular non-Hodgkin's lymphoma (NHL), small lymphocytic (SL) NHL, intermediate grade/follicular NHL, intermediate grade diffuse NHL, Diffuse Large B cell lymphoma, high grade immunoblastic NHL, high grade lymphoblastic NHL, high grade small non-cleaved cell NHL, bulky disease NHL, mantle cell lymphoma, AIDS-related lymphoma, and Waldenström's Macroglobulinemia, Hodgkin's lymphoma (HD), chronic lymphocytic leukemia (CLL), acute lymphoblastic leukemia (ALL), T cell Acute Lymphoblastic Leukemia (T-ALL), Acute myeloid leukemia (AML), Hairy cell leukemia, chronic myeloblastic leukemia, multiple myeloma, post-transplant lymphoproliferative disorder (PTLD), abnormal vascular proliferation associated with phakomatoses, Meigs' syndrome, Merkel Cell cancer, MSI-high cancer, KRAS mutant tumors, adult T-cell leukemia/lymphoma, adenoid cystic cancer (including adenoid cystic carcinoma), melanoma, malignant melanoma, metastatic melanoma, pancreatic cancer, pancreatic adenocarcinoma, ovarian cancer (including ovarian carcinoma), pleural mesothelioma, cervical squamous cell carcinoma (cervical SCC), anal squamous cell carcinoma (anal SCC), carcinoma of unknown primary, gallbladder cancer, pleural mesothelioma, chordoma, endometrial sarcoma, chondrosarcoma, uterine sarcoma, uveal melanoma, amyloidosis, AL-amyloidosis, astrocytoma, and/or Myelodysplastic syndromes (MDS).

[0258] In some embodiments, the cancer is selected from the group consisting of renal clear cell carcinoma (RCC), lung cancer, NSCLC, lung adenocarcinoma, lung squamous cell carcinoma, gastric adenocarcinoma, ovarian cancer, endometrial cancer, breast cancer, triple negative breast cancer (TNBC), head and neck tumor, colorectal adenocarcinoma, melanoma, and metastatic melanoma.

[0259] The present invention also provides for an anti-IL18BP antibody as described herein for use in the treatment of cancer by activating T cells, NK cells, NKT cells, Dendritic cells, MAIT T cells, γδ T cells, and/or innate lymphoid cells (ILCs), and/or modulating Myeloid cells in a patient.

[0260] The present invention also provides for an anti-IL18BP antibody as described herein for use in increasing IL-18 mediated immuno-stimulating activity in the tumor microenvironment (TME), and/or lymph nodes.

[0261] The present invention also provides for an anti-IL18BP antibody as described herein for treating cancer in a recipient patient.

[0262] The present invention also provides for an anti-IL18BP antibody as described herein for a use according to according to any of the preceding claims.

[0263] The present invention also provides for an anti-IL18BP antibody as described herein for use in combination with a second antibody. In some embodiments, the second antibody is selected from the group consisting of an anti-PVRIG antibody, an anti-PD-1 antibody, an anti-PD-L1 antibody, and an anti-TIGIT antibody.

[0264] The present invention also provides for an anti-IL18BP antibody as described herein wherein the anti-IL18-BP antibody exhibits a binding affinity or KD of less than 0.005 pM, 0.01 pM, 0.02 pM, 0.03 pM, 0.04 pM, 0.05 pM, 0.06 pM, 0.07 pM, 0.08 pM, 0.09 pM, 0.10 pM, 0.15 pM, 0.20 pM, 0.25 pM, 0.30 pM, 0.35 pM, 0.40 pM, 0.45 pM, 0.50 pM, 0.55 pM, 0.60 pM, 0.65 pM, 0.70 pM, 0.75 pM, 0.80 pM, 0.85 pM, 0.90 pM, 0.95 pM, or 1 pM.

### BRIEF DESCRIPTION OF THE DRAWINGS

[0265] FIG. 1A-1L depict the vhCDR1), vhCDR2), vhCDR3), vlCDR1), vlCDR2, vlCDR3 sequence of antibody 66650 (FIGS. 1A and 1E and 1I), 66670 (FIGS. 1B and 1F and 1J), 66692 (FIGS. 1C and 1G and 1K), 66716 (FIGS. 1D and 1H and 1L). FIG. 1M provides IgG sequences, including IgG1, IgG2, IgG3 and IgG4.

[0266] FIG. 2A-2U depict the variable heavy and light chains, the vhCDR1, vhCDR2), vhCDR3), vlCDR1), vlCDR2), vlCDR3 sequences as well as the full length of the antibodies ADI-71709 (FIG. 2A), ADI-71719 (FIG. 2B), ADI-71720 (FIG. 2C), ADI-71722 (FIG. 2D), ADI-71701 (FIG. 2E), ADI-71663 (FIG. 2F), ADI-71662 (FIG. 2G), ADI-66692 (FIG. 2H), ADI-71710 (FIG. 2I), ADI-71717 (FIG. 2J), ADI-71739 (FIG. 2K), ADI-71736 (FIG. 2L), ADI-71707 (FIG. 2M), ADI-66716 (FIG. 2N), ADI-71728 (FIG. 2O), ADI-71741 (FIG. 2P), ADI-71742 (FIG. 2Q), ADI-71744 (FIG. 2R), ADI-71753 (FIG. 2S), ADI-71755 (FIG. 2T), and AB-837 (referred also as “AbD35328”, “837”, or “Ab837”) (FIG. 2U).

[0267] FIG. 3A-3E: A) depicts the alignment of CDRH and CDRL sequence between VH3-23 and VL-kappa-1-12 germline sequences-71663 and 71662 and 66692. B) depicts the alignment of CDRH and CDRL sequence between VH1-03 and VL-kappa-1-5 germline sequences 71701, 71707, 71709, 71710, and 71717. C) depicts the alignment of CDRH and CDRL sequence between VH1-69 and VL-kappa-1-2 germline sequences 71719, 71720, 71722 and 71728. D) depicts the alignment of CDRH and CDRL sequence between VH4-39 and VL-kappa-1-12 germline sequences-71736, 71739 and 66716. E) depicts the alignment of CDRH and CDRL sequence between VH4-39 and VL-kappa-1-12 germline sequences-71736, 71739, 66716, 71742, 71744, 71741, 71753 and 71755.

[0268] FIG. 4A-4B: A) depicts the expression of IL18 across all TCGA tumors. and B) depicts the expression of IL18-BP across all TCGA tumors. Box plot of log 10 RPKM for each TCGA tumors, reference line at 1 RPKM.

[0269] FIG. 5A-5B: A) depicts IL18 stratified by IFNγ expression per tumor type in TCGA. B) depicts IL18-BP stratified by IFNγ expression per tumor type in TCGA. Box plot of log 10 RPKM for each TCGA tumors, reference line at 1 RPKM. For tumor abbreviations see Table 1. IFNγ high represent the top quartile and IFNγ low represents the bottom quartile. FC—fold change, P—p-value of student's T-test between IFNγ high to IFNγ low. Fraction represents the number of samples in IFNγ high/IFNγ low.

[0270] FIG. 6A-6B: A) depicts core inflammasome signature, stratified by IFNγ expression per tumor type in TCGA. Box plot of log 10 RPKM for each TCGA tumors, reference line at 1 RPKM. For tumor abbreviations see Table 1. IFNγ high represent the top quartile and IFNγ low represents the bottom quartile. FC—fold change, P—p-value of student's T-test between IFNγ high to IFNγ low. Fraction represents the number of samples in IFNγ high/IFNγ low. B) depicts cosine similarity heatmap and dandogram, between core inflammasome genes, IL18, IL18-BP, IL18R's, and additional upstream inflammasome genes.

[0271] FIG. 7A-7B: A) depicts DotPlot of IL18 and IL18-BP, in subtype of breast cancer, pre and on treatment, expression of the two genes pre and on treatment in TNBC. B) depicts DotPlot of IL18 and IL18-BP, expression of the two genes pre and on treatment in TNBC, divided also by expanding TCR clones (E) and non-expanding TCR clones (_NE).

[0272] FIG. 8: Affinity matrix for mAbs against human IL18-BP to human and cynomolgus monkey (“cyno”) IL18-BP by Biacore

[0273] FIG. 9: Competition with human IL18 for the binding of IL18-BP-Fc performed in AlfaLISA assay with 15 nM of purified Ab with hIgG1 backbone.

[0274] FIG. 10: The blocking activity of the parental mAbs against human IL18-BP analyzed by ELISA

[0275] FIG. 11: The blocking activity of the parental mAbs against cynomolgus monkey IL18-BP analyzed by ELISA

[0276] FIG. 12: IC50 values for the anti-human IL18-BP Abs measured by ELISA

[0277] FIG. 13: The ability of the mAbs against human IL18-BP to rescue human IL18 bound by IL18-BP-Fc protein demonstrated using IL18 HEK293 reporter cells.

[0278] FIG. 14A-14H: Anti-IL-18BP antibodies fully restored IL-18 activity on NK cells. FIGS. 14A and 14H show schematic representations of assay setup; thawed NK cells from four donors were cultuNed for 30 minutes with rhIL-18 (3 or 10 ng/ml) and rhIL-18BP (1 μg/ml), in the presence of rhIL-12 (10 ng/ml) to allow the formation of IL-18-IL-18BP complex. 30 minutes post incubation, the cells were treated with a dose titration of anti-IL-18BP antibodies (20 μg/ml to 0.25 μg/ml; dilution factor of 1:3 (FIGS. 14A-G); or 10 μg/ml to 0.325 μg/ml; dilution factor of 1:2 (FIG. 14H-N)) or isotype control (20 μg/ml (FIG. 14A-G) or 10 μg/ml (FIGS. 14A-G)). FIG. 14I-N shows Anti-IL-18BP antibodies were able to fully restore IFNγ secretion (FIG. 14B-D, 14I-N) and CD69 expression (FIG. 14E-G) in a dose-dependent manner. Isotype controls were not able to restore IL-18 activity.

[0279] FIG. 14N shows the dose response curve of % rescue by Anti-IL-18BP antibodies and calculated EC50s. Representative data is from one donor. Rescue by anti-IL-18BP Ab is calculated as: [(IL-12+IL-18+IL-18BP+ anti-IL-18BP Ab)−(IL-12+IL-18+IL-18BP+ Isotype)]/[(IL-12+IL-18)−(IL-12+IL-18+IL-18BP+ Isotype)].

[0280] FIG. 15A-15J: Anti-IL-18BP antibodies blocked IL-18BP secreted from PBMCs. FIGS. 15A, 15D show Schematic representation of assay setup; thawed PBMCs from two donors were cultured for 24 hours with rhIL-12 (10 ng/ml), rhIL-18 (33.3 ng/ml) and a dose titration of anti-IL-18BP antibodies (FIG. 15B: 20 μg/ml to 0.625 μg/ml; dilution factor of 1:2. FIG. 15E-J: 6 μg/ml to 0.002 μg/ml; dilution factor of 1:3) or isotype control (20 μg/ml). FIGS. 15B-C and 15E-J show Anti-IL-18BP antibodies were able to induce dose-dependent IFNγ secretion above the IL-12+IL-18 control levels, suggesting that the antibodies can block endogenous IL-18BP activity. Representative data is from one donor.

[0281] FIG. 16 depicts affinity measurement of anti-mouse mIL18BP Ab to mouse IL18-BP protein by ELISA.

[0282] FIG. 17 depicts SPR kinetic measurement of anti-mouse IL18-BP (AbD35328 (referred also as “837”, “Ab837” or “AB-837”)).

[0283] FIG. 18 depicts analysis of mAbs performance in functional blocking of mIL18-BP-mIL-18 interaction by ELISA.

[0284] FIG. 19 depicts IC50 analysis for anti-mouse IL18-BP (AbD35328).

[0285] FIG. 20 depicts the functional blocking activity of purified mAbs against mouse IL18-BP by IFNγ secretion.

[0286] FIG. 21 depicts the EC50 analysis for anti-mouse IL18-BP.

[0287] FIG. 22A-22L depict assessment of anti-IL18-BP monotherapy or combo therapy with anti-PD-L1 Ab in mouse syngeneic CT26 tumor model. (A): tumor growth measurement of each group in monotherapy, (B): survival percentage analysis of each group in monotherapy, (C)-(F): overview of tumor growth measurement of individual mice in each group of monotherapy (G): tumor growth measurement of each group in combo therapy, (H): survival percentage analysis of combo therapy, (I)-(K): overview of tumor growth measurement of individual mice in each group of combo therapy, and (L): statistical analysis of the effects of combo therapy.

[0288] FIG. 23A-23L depict assessment of anti-IL18-BP monotherapy or combo therapy with anti-PD-L1 Ab in mouse syngeneic B16/Db-hmgp100 mouse tumor model. (A): tumor growth measurement of each group in monotherapy, (B): survival percentage analysis of each group in monotherapy, (C)-(F): overview of tumor growth measurement of individual mice in each group of mono therapy, (G): tumor growth measurement of each group in combo therapy, (H): survival percentage analysis of each group in combo therapy (I)-(K): overview of tumor growth measurement of individual mice in each group of combo therapy, and (L): statistical analysis of the effects of combo therapy.

[0289] FIG. 24A-24G depict activity of Anti-IL18-BP and anti-TIGIT Combination in B16/Db-hmgp100 Syngeneic Mouse Tumor Model. (A): tumor growth measurement of each group in combo therapy, (B): survival percentage analysis of each group combo therapy, (C)-(F): overview of tumor growth measurement of individual mice in each group of combo therapy, and (G): statistical analysis of the effects of combo therapy.

[0290] FIG. 25A-25G depict activity of Anti-IL18-BP and anti-PVRIG Combination in B16/Db-hmgp100 Syngeneic Mouse Tumor Model. (A): tumor growth measurement of each group in combo therapy, (B): survival percentage analysis of each group in combo therapy (C)-(F): overview of tumor growth measurement of individual mice in each group of combo therapy, and (G): statistical analysis of the effects of combo therapy.

[0291] FIG. 26A-26G depict monotherapy activity of anti-IL18-BP and anti-mPD-L1 in syngeneic E0771 orthotopic mouse tumor model. (A): tumor growth measurement of each group in monotherapy, (B)-(E): overview of tumor growth measurement of individual mice in each group of monotherapy, (F): survival percentage analysis of each group in monotherapy, and (G): statistical analysis of the effects of monotherapy.

[0292] FIG. 27A-27F depict tumor rechallenge experiment of E0771 TNBC model. Groups of 5-10 C57BL/6 tumor-naïve age-matched mice were orthotopically inoculated with E0771 (0.5×10⁶ cells). When tumor reached the volume of 250 mm³, mice were treated with designated mAb: AB-837 mIgG1-D265A or isotype control followed by 5 additional doses. After two months, tumor-free and naïve aged-matched mice were orthotopically re-inoculated with E0771. (A): Tumor volumes are represented as the mean volume±SEM. (B) Individual tumors measurements for each mouse are depicted, CR-complete responders, PR-partially responders (TV<=500 mm³). (C) Kaplan-Meier survival curves for each group are shown. (D) Spleen weight/body weight ratio. (E) percent of CD44⁺CD62L⁻CD8⁺ effector T cells. (F) number of CD19+ cells per mg spleen.

[0293] FIG. 28A-28F depict the amino acid sequence of the human (A) and mouse (C) IL18-BP proteins. Signal Peptide sequence is highlighted. The secreted human and mouse IL18-BP protein chains are depicted in (B) and (D), respectively. FIG. 28 E and F depict the amino acid sequence of human and mouse IL18 proteins, respectively.

[0294] FIG. 29A-29B depict the variable heavy and light chains as well as the vhCDR1), vhCDR2), vhCDR3), vlCDR1), vlCDR2) and vlCDR3 sequences of CHA.7.518.1.H4(S241P) and CHA.7.538.1.2.H4(S241P).

[0295] FIG. 30A-30B depicts the variable heavy and light chains as well as the vhCDR1), vhCDR2), vhCDR3), vlCDR1), vlCDR2) and vlCDR3 sequences of CPA.9.083.H4(S241P) and CPA.9.086.H4(S241P).

[0296] FIG. 31 shows the ability of the mAbs against human IL18-BP to rescue human IL18 bound by IL18-BP in human serum demonstrated by ELISA

[0297] FIG. 32 shows the ability of the mAbs against human IL18-BP to rescue cyno IL18 bound by cyno IL18-BP demonstrated using ELISA.

[0298] FIG. 33 shows TIGIT and IL18Ra are co-expression within the TME.

[0299] FIG. 34A-34QQQQ depicts the sequences of four anti-TIGIT antibodies that block the interaction of TIGIT and PVR, CPA.9.083.H4(S241P), CPA.9.086.H4(S241P), CHA.9.547.7.H4(S241P) and CHA.9.547.13.H4(S241P), as well as benchmark antibodies, BM26 and BM29, and numerous other anti-TIGIT antibodies.

[0300] FIG. 35A-35B depicts the amino acid sequences of the constant domains of human IgG1 (with some useful amino acid substitutions), IgG2, IgG3, IgG4, IgG4 with a hinge variant that finds particular use in the present invention, and the constant domains of the kappa and lambda light chains.

[0301] FIG. 36A-36AG depicts the variable heavy and light chains as well as the vhCDR1), vhCDR2), vhCDR3), vlCDR1), vlCDR2) and vlCDR3 sequences of the anti-PVRIG antibodies of the invention.

[0302] FIG. 37A-37D depicts the sequences of other PVRIG antibodies of the present invention.

[0303] FIG. 38A-38X provides additional anti-PVRIG antibodies for use in the present invention.

[0304] FIG. 39A-39B depicts the sequences of exemplary anti-PD-1 antibodies.

[0305] FIG. 40A-40I depicts the sequences of exemplary anti-PD-L1 antibodies.

[0306] FIG. 41A-41D depicts Biacore KD measurements, performed with biotinylated human/cyno IL18BP-Fc protein coated on the CM5 chip. FIG. 41(A), (B): Biacore image of the anti-IL18BP Fab-human IL18BP interactions; 10 min dissociation (41(A)), 85 min dissociation (41(B)). FIG. 41(C), (D): Biacore image of the anti-IL18BP Fab-cyno IL18BP interactions, 10 min dissociation (41(C)), 85 min dissociation (41(D)).

[0307] FIG. 42 depicts a Table, showing KD values for human/cyno anti-IL18BP Fab-IL18BP interactions measured by Biacore.

[0308] FIG. 43A-43B presents the affinity of optimized IL18BP antibodies, accessed using MSD. FIG. 43A shows an overlay of the Fab-IL18BP MSD Image (in Black) with the Human IL-18-IL18BP MSD Image (in Green). FIG. 43B shows an overlay of the Fab-IL18BP MSD Image (in Black) with the Cyno IL-18-IL18BP MSD Image (in Green).

[0309] FIG. 44 presents a Table, showing KD values for human/cyno anti-IL18BP Fab-IL18BP interactions measured by MSD.

[0310] FIG. 45 presents a Table, showing KD values for human/cyno IL18-IL18BP interactions measured by MSD.

[0311] FIG. 46 provide exemplary antibody characteristics for an αIL-18BP antibody (αIL-18BP Ab) of interest.

[0312] FIG. 47 shows IL-18BP levels are elevated in human cancers. Expression of IL18BP transcripts in normal (green) or cancer (red) tissues from the TCGA database. GBM, glioblastoma multiforme; HSNC, head and neck squamous carcinoma; KIRC, kidney renal clear cell carcinoma; PAAD, pancreatic adenocarcinoma; SKCM, skin cutaneous melanoma; STAD, stomach adenocarcinoma (*P<0.01).

[0313] FIG. 48 shows IL-18BP is expressed in suppressive myeloid populations in the TME suggesting resistance mechanism. Single-cell RNA analyses of tumor-infiltrating myeloid cells, including tumor associated macrophages (TAMs) and dendritic cells (DCs) in human Colorectal cancer (CRC) showing that IL-18BP is expressed in suppressive myeloid population in the tumor. This suggests a resistance mechanism to immune activation in the tumor microenvironment (TME). Left Panel: Myeloid cell population in the peripheral (PBMC), normal tumor (NAT) and in the tumor. Right Panel: IL18BP is mainly expressed in cDC2-CD1C and TAM-C1QC, suppressive myeloid populations suggestive that IL18BP could be a resistance mechanism to immune cell activation in the tumor.

[0314] FIG. 49A-49B provides that αIL-18BP Ab (ADI-71739) enhances stimulatory activity of human T cells. A) Schematic representation of assay setup; thawed tumor infiltrating lymphocytes (TILs), co-cultured with MEL624 cells in a 1:1 ratio, were treated for 30 minutes with rhIL-18 (R&D systems, 30 ng/ml) and rhIL-18BP (R&D systems, 1 μg/ml), to allow the formation of IL-18-IL-18BP complex. 30 minutes post incubation, the cells were treated with ADI-71739 or isotype control (10 μg/ml). B) shows that the anti-IL-18BP antibody was able to increase IFNγ secretion from TILs compared to isotype control. C) Schematic representation of assay setup; MEL-624 cells that overexpress PD-L1 were loaded with CMV pp65 peptide and seeded. The cells were cultured for 30 minutes with rhIL-18 (30 ng/ml) and rhIL-18BP (2 μg/ml), to allow the formation of IL-18-IL-18BP complex. Then the cells were treated with ADI-71739, Pembrolizumab or isotype control (all antibodies were administered at same final concentration of 10 μg/ml). 30 minutes post incubation with antibodies, CMV-reactive T-cells were added to the culture. D) ADI-71739 as mono was able to increase IFNγ secretion from CMV-reactive T-cells, and in a more potent manner when combined with Pembrolizumab.

[0315] FIG. 50A-50B shows anti-IL-18BP antibody fully restored IL-18 activity in MEL624: TIL assay. FIG. 50A: Schematic representation of assay setup; thawed tumor infiltrating lymphocytes (TILs), co-cultured with MEL624 cells in a 1:1 ratio, were treated for 30 minutes with rhIL-18 (30 ng/ml) and rhIL-18BP (1 μg/ml), to allow the formation of IL-18-IL-18BP complex. 30 minutes post incubation, the cells were treated with a dose titration of anti-IL-18BP antibody (ADI-71722, (30 μg/ml to 0.01 μg/ml; dilution factor of 1:3) or isotype control (30 μg/ml). FIG. 50B: shows that the anti-IL-18BP antibody was able to fully restore IFNγ secretion in a dose-dependent manner. The isotype control was not able to restore IL-18 activity. FIG. 50C: shows the dose response curve of % rescue by anti-IL-18BP antibody and calculated EC50. Representative data is from one donor. Rescue by anti-IL-18BP Ab is calculated as: [(IL-18+IL-18BP+ anti-IL-18BP Ab)−(IL-18+IL-18BP+ Isotype)]/[(IL-18)−(IL-18+IL-18BP+ Isotype)].

[0316] FIG. 51A-51B shows anti-hIL-18BP antibody enhances activity of PD-1 and DNAM-1 axis blockade in an in-vitro CMV recall assay. Anti-IL-18BP antibody increased IFNg secretion by CMV-reactive T-cells as mono and in combination with aPVRIG/aTIGIT/Pembrolizumab. A) Schematic representation of assay setup; MEL-624 cells that overexpress PD-L1 were loaded with CMV pp65 peptide and seeded. The cells were cultured for 30 minutes with rhIL-18 (30 ng/ml) and rhIL-18BP (2 μg/ml), to allow the formation of IL-18-IL-18BP complex. Then the cells were treated with anti-IL-18BP antibody (ADI-71722, anti-PVRIG, anti-TIGIT, Pembrolizumab or isotype control (all antibodies were administered at same final concentration of 10 μg/ml). 30 minutes post incubation with antibodies, CMV-reactive T-cells were added to the culture. B) ADI-71722 increased IFNγ secretion by CMV-reactive T-cells as mono and in combination with anti-PVRIG/anti-TIGIT/Pembrolizumab. Left figure: Anti-IL-18BP antibody as mono was able to fully restore IFNγ secretion, and in a more potent manner when combined with Pembrolizumab/anti-PVRIG. Right figure: ADI-71722 as mono was able to fully restore IFNγ secretion, and in a more potent manner when combined with Pembrolizumab/anti-TIGIT.

[0317] FIG. 52 provides data showing ADI-71739 binds human and cyno IL-18BP at high affinity and mouse Il-18 bp at low affinity. ADI-71739 binds human and cyno IL-18BP at high affinity and mouse Il-18 bp at low affinity: Upper panel (from left to right): human IL18-IL18BP interaction, cyno IL18-IL18BP interaction and mouse IL18-IL18BP interaction measurements in KinExA, final KD are 441 fM, 345 fM and 3.7 pM respectively. Lower panel (from left to right): ADI-71739-human IL18BP interaction, ADI-71739-cyno IL18BP interaction measurement in KinExA and ADI-71739-mouse IL18BP interaction measurement by Biacore. Final KD are 291fM, 209 fM and 4 nM respectively. For each run in KinExA, two or three curves with different column binding protein (CBP) concentrations were run and analyzed using n-curve analysis to determine the Kd.

[0318] FIG. 53 shows blocking effect of anti IL18BP Abs on the binding of human IL18BP to human IL-18. Blocking effect of anti-IL18BP Abs was tested by ELISA, using 1 ng/ml human IL-18 protein.

[0319] FIG. 54 shows competition ELISA using complex of soluble IL18-IL18BP and anti IL18BP Abs. Blocking of IL18-IL18BP complex formation was tested by ELISA, MAB1191 shows reduced blocking activity compared to 66716 Ab.

[0320] FIG. 55 shows IL18Ra is expressed on TILs subsets in the TME and its expression is induced on TILs compared to periphery. IL18Ra is expressed on TILs in the TME and its expression is induced on CD4 TILs compared with periphery. A) Expression of IL18Ra on CD8+ and CD4+ and NK TILs from dissociated human tumors of various cancer types is shown. Each dot represents a distinct tumor from an individual patient. Fold expression value was calculated by dividing the MFI of a target by the MFI of the relevant isotype control. (FOI). Average and SEM is shown by the ticks. B) Expression of IL18Ra on CD4+ and CD8⁺ T and NK cells from donor-matched PBMCs and TME. Statistical analysis was preformed using paired t test (two tailed), P<0.05; ** p=0.0064

[0321] FIG. 56 shows IL18 levels in serum of cancer patients is increased compared with levels in HD serum. A) Levels of IL18 analytes (IL18 and IL18BP) in patient's serum across indications. B) Dot plot representing IL18 analytes in serum samples from an individual patient or HD. Statistical analysis was preformed using t test (two tailed), P≤ 0.0005***

[0322] FIG. 57 shows IL18 analytes (IL18 and IL18BP) levels in tumor derived supernatants (TDS) across indications. Dot plot representing IL18 analytes in TDS samples. Each dot represents an individual patient's sample.

[0323] FIG. 58A-58B shows levels of IL18 (A) and IL18BP (B) in patient's tumor derived supernatant (TDS) across indications. Mean levels are represented by black lines.

[0324] FIG. 59A-59C shows IL-18BP is expressed in suppressive myeloid populations in the TME suggesting resistance mechanism. IL-18BP is Expressed in Suppressive Myeloid Populations and correlate to PD-L1 in the TME Suggesting Resistance Mechanism. A) IL-18BP correlates with PD-L1 at RNA level (TCGA) in colon and breast cancers suggesting a resistance mechanism to immune activation in the tumor microenvironment (TME). B) Single-cell RNA analyses of tumor-infiltrating myeloid cells, including tumor associated macrophages (TAMs) and dendritic cells (DCs) in colon cancer patients showing that IL-18BP is up-regulated in myeloid population in the TME compared to the periphery (PBMCs), suggesting a resistance mechanism to immune activation in the TME. C) Single-cell RNA analyses of tumor-infiltrating myeloid cells, including tumor associated macrophages (TAMs) and dendritic cells (DCs) across indications showing that IL-18BP is up-regulated in myeloid population in the TME compared to the periphery (PBMCs), suggesting a resistance mechanism to immune activation in the TME

[0325] FIG. 60A-60D shows IL-18BP is upregulated following immune checkpoint blockade (ICB) treatment. A-C) IL-18BP is upregulated (RNA level) following ICB treatment IL-18BP levels are upregulated in the tumor microenvironment (RNA) following treatment with anti-PD-1 (breast and basal cell carcinoma) or anti-PD-1 plus anti CTLA-4 (melanoma) suggesting a potential resistance mechanism. D) IL-18BP is elevated in NSCLC patient serum post aPD-(L) 1 treatment Quantification of plasma IL-18BP protein level by ELISA for healthy donors (n=22 and patients with NSCLC (n=52) at baseline before treatment and after receiving treatment with anti-PD-(L) 1 (n=52).

[0326] FIG. 61A-61B shows IL-18BP baseline serum levels may be associated with poor response to anti-PD-1. A supportive data for the role of IL-18BP as a soluble ICP and a potential resistance mechanism to PD1 blockage in Renal Cell Carcinoma patients receiving Pembrolizumab plus Lenvatinib. A) High IL-18BP in patient serum pre-treated with Pembrolizumab plus Lenvatinib is associated with shorter progression free survival (PFS). B) High IL-18BP in patient serum is pre-treated with Pembrolizumab plus Lenvatinib associated with stable or progressive disease (SD/PD).

[0327] FIG. 62 shows IL-18BP baseline serum levels may be associated with poor response to anti-PD-1. A supportive data for the role of IL-18BP as a soluble ICP and a potential resistance mechanism to PD1 blockage in melanoma cancer patients receiving anti PD-1 treatment. High IL-18BP in serum of melanoma cancer patients pre-treated with anti PD-1 is associated with poor response. Raw Olink data (NPX format) Student's T-test was performed for IL18BP protein after intensity normalization for Target products.

[0328] FIG. 63A-63B shows Principal Component Analysis (PCA) of IL-18 and IL-18BP levels in serum of Head & Neck cancer. PCA shows that mainly tumor's sites separate between samples with high levels of IL-18 Vs. low levels. A-B. Location of tumor in tongue correlates with high levels of IL-18 and lower levels of IL18BP compared with other sites.

[0329] FIG. 64 shows IL-18 and IL-18BP levels (dotplots) in Head & Neck patient's serum in different tumor's sites. Higher levels of IL-18 in Head & Neck patient's serum are shown in tongue.

[0330] FIG. 65A-65C shows IL18 and IL18BP plasma levels in NSCLC patients are increased following anti-PD-1 monotherapy or anti-PD-1+chemotherapy combination. Average plasma levels of IL18 and IL18BP are higher in responder patients at baseline and increase in NR patients treated with anti-PD1. A) IL18 and IL18BP levels in plasma of R/NR NSCLC patients at baseline. B) IL18 and IL18BP levels in plasma of individual NSCLC patients (R/NR) at baseline and following single anti-PD-1 treatment. C) IL18 and IL18BP levels in plasma of individual NSCLC patients (R/NR) at baseline and following single anti PD1 treatment or following combined treatment of chemotherapy+ anti-PD-1. D) Percentage of change from baseline of IL18 and IL18BP in R/NR NSCLC patients following single anti-PD-1 treatment or chemotherapy combined with anti-PD-1. P values in A-C graphs were obtained following paired T test.

[0331] FIG. 66 shows the whole blood assay data. Anti-IL-18BP antibody Ab-71709, as mono or in combination with Nivolumab, did not show signs of systemic immune activation in ID.Flow, an ex vivo system that mimics the human blood circulation. Fresh whole blood was taken from six healthy volunteers and immediately transferred to a whole blood loop system. The test items were administered, and the blood was set to circulate at 37° C. to prevent clotting. Blood samples collected at the 24 hr time point were analyzed for hematology and flow cytometry parameters and then processed to plasma for cytokine analysis. The anti-CD52 antibody Alemtuzumab was included as a reference antibody with manageable cytokine release in the clinic. As opposed to Alemtuzumab, according to the various readouts employed, the anti-IL-18BP antibody did not induce any signs of systemic immune activation, as mono or in combination with the anti-PD1 antibody Nivolumab.

[0332] FIG. 67A-67B shows in vitro studies testing the effects of ADI-71739 on killing of melanoma cells by human TILs. Anti-IL18-BP antibody ADI-71739 increased killing of melanoma cells by tumor infiltrating lymphocytes. A) Schematic representation of assay setup. MEL624 cells were co-cultured with human TILs that were previously enriched for MARTI or gp100 peptide-specific clones. rhIL-18 (R&D systems, 50 ng/ml) and rhIL-18BP (R&D systems, 1 μg/ml) were added to the co-culture for 30 minutes to allow the formation of IL-18:IL-18BP complex prior to treatment with 10 μg/ml ADI-71739 or isotype control. The co-culture was monitored for 72 hours using an IncuCyte live cell imaging instrument. B) Addition of IL-18 (grey) enhanced tumor cell killing as indicated by lower confluence (left) and increased apoptosis (right) over time of the MEL624 cells. In the presence of the isotype control antibody (black), IL-18BP abrogated the effects of IL-18, while the anti-IL-18BP antibody (turquoise) was able to completely restore these effects.

[0333] FIG. 68A-68B shows in vitro studies testing the effects of combination of ADI-71739 with other checkpoint blocking antibodies. Anti-IL18-BP antibody ADI-71739 increased IFNg secretion by CMV-specific T cells as mono and in combination with aPVRIG/aTIGIT/Pembrolizumab. A) Schematic representation of assay setup. MEL624 cells that overexpress PD-L1 were loaded with CMV peptide pp65. The cells were cultured for 30 minutes with rhIL-18 (R&D systems, 30 ng/ml) and rhIL-18BP (R&D systems, 2 μg/ml) to allow the formation of IL-18:IL-18BP complex, and the cells were then treated with 10 μg/ml ADI-71739 or aPVRIG (anti-PVRIG) or aTIGIT (anti-TIGIT) or Pembrolizumab (anti-PD-L1) or isotype control, as mono or in various combinations. CMV-specific T-cells were then added to the culture and IFNg secretion was measured after an overnight incubation. B) The anti-IL-18BP antibody alone was able to increase IFNγ secretion by the T cells, and this effect was augmented upon combination with Pembrolizumab/aPVRIG/aTIGIT.

[0334] FIG. 69A-69B shows in vitro studies testing the effects of ADI-71739 on human TIL function in the presence of endogenous IL-18BP levels. Anti-IL18BP antibody ADI-71739 increased IFNg release by tumor infiltrating lymphocytes. A) Schematic representation of assay setup. MEL624 cells were co-cultured with human TILs that were previously enriched for MARTI or gp100 peptide-specific clones. IL-18 (3.7 ng/ml) was added to the co-culture along with 5 μg/ml ADI-71739 or isotype control. The co-culture was set for 18 hours following which IFNg levels were measured in supernatants. B) IFNγ levels were increased in co-cultures treated with ADI-71739 (turquoise) as compared with isotype-treated samples (black). Representative examples from two TIL donors are shown.

[0335] FIG. 70A-70C shows that Bound IL-18 levels in the TME are above required amount for T cell activation in vitro. A) Schematic representation of assay setup; thawed tumor infiltrating lymphocytes (TILs), co-cultured with MEL624 cells in a 1:1 ratio, were treated with rhIL-18 (R&D systems, 1.23-300 ng/ml) for 24 hr. B) rhIL-18 increased IFNγ secretion in a dose-dependent manner. rhIL-18 activates TILs in concentration above ˜1 ng/ml and reached saturation at ˜100 ng/ml. C) Levels of bound IL-18 in TDS across indications are mostly above the level required for in vitro T cell activation. Bound IL18 levels were calculated by deducting IL18 free from total IL-18 measured for each sample by two separate ELISA kits. Dashed red line represent the level required for functional activity (1.5 ng/gr). Black lines represent the median level bound IL-18 for each tumor type.

[0336] FIG. 71A-71B shows that unlike other cytokines, inflammasome induced cytokines such as IL-18 and IL-1b are abundant in the TME. A) IL-18 and IL-1b are inflammasome derived cytokines with opposite effects in the TME. While IL-18 promotes T and NK cell activation and lead to anti tumorigenic activity, IL1b has a dual role and in sum of effects lead to pro-tumorigenic activity. B) Dotplot shows levels of cytokines in tumor derived supernatants measured across various indications. Each dot represents one sample. The mean is depicted by the short black lines. Dashed red lines represent the limit of detection for each cytokine.

[0337] FIG. 72 shows anti-IL-18BP antibody and anti-PD-L1 antibody combination studies in mouse tumor models. Anti-IL-18BP Ab in combination with anti-PD-L1 Ab increase tumor growth inhibition and survival in mouse tumor model. Groups of ten 6 weeks old female C57BL/6 mice were subcutaneously injected with E0771 and were administered with mIgG1 Synagis isotype control, anti-mouse IL-18BP Ab, anti PDL1 ab or combination of anti-mouse IL-18BP Ab with anti PD-L1 ab (IP) followed by 6 additional doses. Tumor volumes are represented as the Mean volume±SEM. Tumor volumes were measured twice weekly.

[0338] FIG. 73A-73C shows administration of anti-IL18BP is expected to have a better therapeutic window than engineered IL-18. C57BL/6 mice were subcutaneously injected with MC38ova cells and treated with designated mAb Synagis mIgG1 (IP), anti-IL18 bp mIgG1 (IP), PBS (SC), or Engineered IL-18 (SC) twice weekly. A) Mice were weighed once weekly. B) Mice were bled before the 4th treatment, 4 hours after the 4th treatment, and 24 hours after the 4th treatment. Serum was analyzed for presence of indicated molecules-IFNg, TNF, MCP1, IL6. C) Serum was analyzed for levels of IL-18. D. Spleens were harvested from mice 24 hours after the 4th treatment and weighed. E. Spleens harvested from mice treated with IL15 or IL15+ILRa were weighed.

[0339] FIG. 74A-74B depict assessment of anti-IL18-BP monotherapy in mouse syngeneic MC38ova tumor model. C57BL/6 mice were subcutaneously injected with 1.2M MC38ova cells and treated with designated mAb Synagis mIgG1 (IP), anti-IL18 bp mIgG1 (IP) twice weekly. A) tumor growth measurement of each group, B) overview of tumor growth measurement of individual mice in each group.

[0340] FIG. 75 shows that Anti-IL18 bp antibody modulates tumor microenvironment without effecting periphery in MC38ova tumor model. C57BL/6 mice were subcutaneously injected with MC38ova^{dim} and were treated with anti-mouse IL-18BP Ab (IP). Tumors, spleens and serum were harvested, and immune composition and cytokine concentrations were determined. A-G) representing tumor microenvironment, H) represents spleen, I) represents serum.

[0341] FIG. 76. Binding of MAB1191 Ab to human IL18BP, affinity measurement using Biacore.

[0342] FIG. 77: Effect of combination of anti-IL18BP antibody with oxaliplatin in MC38ovadim tumor model. Groups of 10 C57BL/6 mice were inoculated with MC38OVAdim. At tumor volume (TV) of 110 mm3, mice were treated with 5 mg/kg of oxaliplatin or control DDW. At TV 140 mm3 mice were treated with 15 mg/kg of anti-IL18BP mIgG1 Ab or isotype control, followed by 5 additional doses. (A) TVs are represented as the mean volume±SEM. (B) Individual tumors measurements for each mouse are depicted (n=10 per group). CR-complete responders, PR-partially responders (TV<=500 mm3) CR-complete responders, PR-partially responders.

[0343] FIG. 78. The anti-tumor activity of anti-mouse IL18BP as a single agent in MC38OVAdim and B16F10-hmgp100 mouse tumor models. Groups of 10 C57BL/6 mice were inoculated with MC38ovadim or B16F10-hmgp100 cells. Mice were treated with designated mAb: anti IL-18BP Ab or isotype control. (A-B) anti-IL-18BP Ab inhibits tumor growth in MC38ova (A) or B16F10-hmgp100 (B) moues tumor models. Tumor volumes are represented as the mean volume±SEM.

### DETAILED DESCRIPTION OF THE INVENTION

### I. Introduction

### A. Interleukin 18 Binding Protein

[0344] The present invention provides antibodies that specifically bind to interleukin 18 binding protein (IL18-BP). “Protein” in this context is used interchangeably with “polypeptide” and includes peptides as well. The present invention provides antibodies that specifically bind to IL18-BP.

[0345] The IL18-BP gene is localized to the human chromosome 11, and no exon coding for a transmembrane domain could be found in the 8.3 kb genomic sequence comprising the IL18-BP gene. Four isoforms of IL18-BP generated by alternative mRNA splicing have been identified in humans so far. They were designated IL18-BP a, b, c, and d, all sharing the same N-terminus and differing in the C-terminus (Novick, D. et al., Immunity, 10:127-136, (1999)). These isoforms vary in their ability to bind IL18 (Kim, S.-H. et al., PNAS, 97 (3): 1190-1195 (2000)). Of the four human IL18-BP (hIL18-BP) isoforms, isoforms a and c are known to have a neutralizing capacity for IL18. The most abundant IL18-BP isoform, isoform a, exhibits a high affinity for IL18 with a rapid on-rate and a slow off-rate, and a dissociation constant (K_{d}) of approximately 0.4 nM (Kim, S.-H. et al., PNAS, 97 (3): 1190-1195 (2000)). Others have reported that the affinity of IL18-BP to IL-18 is approximately ˜1 pM or ˜25 pM (Zhou T. et al., Nature, 583 (7817): 609-614, (2020, Girard C. et al., Rheumatology 2016; 55:2237-2247 (2016)) IL18-BPb and IL18-BPd isoforms lack a complete Ig domain and lack the ability to bind or neutralize IL18. Two mouse isoforms of IL18-BP, resulting from mRNA splicing and found in various cDNA libraries and have been expressed, purified, and assessed for binding and neutralization of IL18 biological activities (Kim, S.-H. et al., PNAS, 97 (3): 1190-1195 (2000)). Human and mouse IL18-BP share 60.8% amino acid similarity. Murine IL18-BPc and IL18-BPd isoforms, possessing the identical Ig domain, also neutralize>95% murine IL18 at a molar excess of two. However, murine IL18-BPd, which shares a common C-terminal motif with human IL18-BPa, also neutralizes human IL18. Molecular modeling identified a large mixed electrostatic and hydrophobic binding site in the Ig domain of IL18-BP, which could account for its high affinity binding to the ligand (Kim, S.-H. et al., PNAS, 97 (3): 1190-1195 (2000)).

[0346] IL18-BP is a secreted protein of 194 amino acids in length, with a signal peptide (spanning from amino acid 1 to 30, and a secreted chain (spanning from amino acid 41 to 171 and 4 potential N-glycosylation sites but no transmembrane domains. The full length human IL18-BP isoform a protein is shown in FIG. 28 (SEQ ID NO:254). The present invention provides formulations comprising antibodies that specifically bind to IL18-BP proteins. “Protein” in this context is used interchangeably with “polypeptide”, and includes peptides as well. The present invention provides antibodies that specifically bind to IL18-BP proteins. IL18-BP is a secreted protein of 194 amino acids in length, with a signal peptide (spanning from amino acid 1 to 30, and a secreted chain (spanning from amino acid 41 to 171).

[0347] Accordingly, as used herein, the term “IL18 BP”, “IL-18BP”, “IL18BP”, “IL18-BP”, “IL18 binding protein”, or “Interleukin 18 binding protein” may optionally include any such protein, or variants, conjugates, or fragments thereof, including but not limited to known or wild type IL18-BP, as described herein, as well as any naturally occurring splice variants, amino acid variants or isoforms. The term of IL18-BP is used interchangeably with “IL18 binding protein”, “Interleukin 18 binding protein”, “IL18 BPa”, “interleukin-18-binding protein isoform a”, “interleukin-18 binding protein isoform a precursor”, The term “soluble” form of IL18-BP is also used interchangeably with the terms “IL18 BP soluble” or “fragments of IL18-BP polypeptides”, which may refer broadly to one or more of the following optional polypeptides. The term “soluble” with regard to the form of IL18-BP is also used interchangeably with the terms “secreted” as well as “fragments of IL18-BP polypeptides”, which may refer broadly to one or more of the IL18-BP polypeptides disclosed herein.

[0348] IL18-BP is constitutively expressed in the spleen and belongs to the immunoglobulin superfamily. The residues involved in the interaction of IL18 with IL18-BP have been described through the use of computer modelling (Kim, S.-H. et al., PNAS, 97 (3): 1190-1195 (2000)) and based on the interaction between the similar protein IL-1ß with the IL-IR type I (Vigers, G. P. A. et al., Nature, 386:190-194 (1997)). IL18-BP functions as an inhibitor of the proinflammatory cytokine, IL18. IL-18 modulates immune system functions including induction of IFNγ production, Th1 differentiation, NK cell activation, and cytotoxic T lymphocytes (CTL) responses (Tominaga, K., et al., International Immunology, 12 (2): 151-160 (2000 and Senju, H., et al., Int J Biol Sci., 14 (3): 331-340 (2018)). IL18-BP binds IL18, prevents the binding of IL18 to its receptor, and thus inhibits IL18 induced T and NK cell activation and proliferation, and pro-inflammatory cytokine production, resulting in reduced T and NK cell activity and T-helper type 1 immune responses. IL18-BP abolishes IL18 induction of IFN-γ and IL18 activation of NF-κB in vitro. In addition, IL18-BP inhibits induction of IFN-γ in mice injected with LPS terminus (Novick, D. et al., Immunity, 10:127-136, (1999)).

[0349] IL18 is constitutively present in many cells (Puren et al., PNAS, 96:2256-2261 (1999)) and circulates in healthy humans (Urushihara et al. 2000, representing a unique phenomenon in cytokine biology. Due to the high affinity of IL18 to IL18-BP (Kd˜1 pM) as well as the high concentration of IL18-BP found in the circulation (20-fold molar excess over IL18, it has been hypothesized that most, if not all of the IL18 molecules in the circulation are bound to IL18-BP. Thus, the circulating IL18-BP that competes with cell surface receptors for IL18 may act as a natural anti-inflammatory and an immunosuppressive molecule.

[0350] According to at least some embodiments of the invention, the anti-IL18-BP antibodies (including antigen-binding fragments) that bind to IL18-BP and block the interaction of IL18 and IL18-BP, thereby releasing increased levels of free IL18 are used to enhance T cells, NK cells, NKT cells, Myeloid cells, Dendritic cells, MAIT T cells, Y& T cells, and/or innate lymphoid cells (ILCs) activation, proliferation, cytokines and/or chemokines secretion, and can be used in treating diseases such as cancer and pathogen infection. These anti-IL18-BP antibodies find use in treating diseases such as cancer.

[0351] Accordingly, the invention provides anti-IL18-BP antibodies as provided in FIGS. 1, 2, and/or 3 (e.g., including anti-IL18-BP antibodies including those with CDRs identical to those shown in FIGS. 1, 2, and/or 3). IL18-BP, also called Interleukin-18 binding protein, UniProtKB/Swiss-Prot (095998) or HGNC (5987) NCBI Entrez Gene (10068, relates to amino acid and nucleic acid sequences shown in RefSeq accession identifier: NG_029021.1, NM_001039659.1, NP_001034748.1, NC_000011.10 Chromosome 11 Reference GRCh38.p13 Primary Assembly accession identifier: NM_001039660.2 and NP_001034749.1 and NC_000011.9 Chromosome 11 Reference GRCh38.p13 Primary Assembly accession identifier: NP_001034748.1, NM_001039659.2, NP_005690.2NM_005699.3 NP_001034748.1NM_001039659.2, NP_005690.2, NM_005699.3, NP_001138529.1 NM_001145057.1, NP_001138527.1, NM_001145055.1. In some embodiments, the antibodies of the invention are specific for the IL18-BP.

### II. Anti-IL18-BP Antibodies

[0352] Accordingly, the invention provides anti-IL18-BP antibodies as provided in FIGS. 1, 2 and 3 (e.g., including anti-IL18-BP antibodies including those with CDRs identical to those shown in FIGS. 1, 2, and/or 3), as well as antibodies that compete for binding with the antibodies enumerated in FIGS. 1, 2, and/or 3.

[0353] As is discussed below, the term “antibody” is used generally. Antibodies that find use in the present invention can take on a number of formats as described herein, including traditional antibodies as well as antibody derivatives, fragments and mimetics, described below. In general, the term “antibody” includes any polypeptide that includes at least one antigen binding domain, as more fully described below. Antibodies may be polyclonal, monoclonal, xenogeneic, allogeneic, syngeneic, or modified forms thereof, as described herein, with monoclonal antibodies finding particular use in many embodiments. In some embodiments, antibodies of the invention bind specifically or substantially specifi cally to IL18-BP molecules. The terms “monoclonal antibodies” and “monoclonal antibody composition”, as used herein, refer to a population of antibody molecules that contain only one species of an antigen-binding site capable of immunoreacting with a particular epitope of an antigen, whereas the term “polyclonal antibodies” and “polyclonal antibody composition” refer to a population of antibody molecules that contain multiple species of antigen-binding sites capable of interacting with a particular antigen. A monoclonal antibody composition typically displays a single binding affinity for a particular antigen with which it immunoreacts.

[0354] Traditional full length antibody structural units typically comprise a tetramer. Each tetramer is typically composed of two identical pairs of polypeptide chains, each pair having one “light” (typically having a molecular weight of about 25 kDa) and one “heavy” chain (typically having a molecular weight of about 50-70 kDa). Human light chains are classified as kappa and lambda light chains. The present invention is directed to the IgG class, which has several subclasses, including, but not limited to IgG1, IgG2, IgG3, and IgG4. Thus, “isotype” as used herein is meant any of the subclasses of immunoglobulins defined by the chemical and antigenic characteristics of their constant regions. While the exemplary antibodies herein designated “CPA” are based on IgG1 heavy constant regions, as shown in FIG. 4, the anti-IL18-BP antibodies of the invention include those using IgG2, IgG3 and IgG4 sequences, or combinations thereof. For example, as is known in the art, different IgG isotypes have different effector functions which may or may not be desirable. Accordingly, the CPA antibodies of the invention can also swap out the IgG1 constant domains for IgG2, IgG3 or IgG4 constant domains (depicted in FIG. 1E), with IgG2 and IgG4 finding particular use in a number of situations, for example for ease of manufacture or when reduced effector function is desired, the latter being desired in some situations.

[0355] The amino-terminal portion of each chain includes a variable region of about 100 to 110 or more amino acids primarily responsible for antigen recognition, generally referred to in the art and herein as the “Fv domain” or “Fv region”. In the variable region, three loops are gathered for each of the V domains of the heavy chain and light chain to form an antigen-binding site. Each of the loops is referred to as a complementarity-determining region (hereinafter referred to as a “CDR”), in which the variation in the amino acid sequence is most significant. “Variable” refers to the fact that certain segments of the variable region differ extensively in sequence among antibodies. Variability within the variable region is not evenly distributed. Instead, the V regions consist of relatively invariant stretches called framework regions (FRs) of 15-30 amino acids separated by shorter regions of extreme variability called “hypervariable regions”.

[0356] Each VH and VL is composed of three hypervariable regions (“complementary determining regions,” “CDRs”) and four FRs, arranged from amino-terminus to carboxy-terminus in the following order: FR1-CDR1-FR2-CDR2-FR3-CDR3-FR4.

[0357] The hypervariable region generally encompasses amino acid residues from about amino acid residues 24-34 (LCDR1; “L” denotes light chain), 50-56 (LCDR2 and 89-97 (LCDR3) in the light chain variable region and around about 31-35B (HCDR1; “H” denotes heavy chain), 50-65 (HCDR2, and 95-102 (HCDR3) in the heavy chain variable region, although sometimes the numbering is shifted slightly as will be appreciated by those in the art; Kabat et al., SEQUENCES OF PROTEINS OF IMMUNOLOGICAL INTEREST, 5 th Ed. Public Health Service, National Institutes of Health, Bethesda, Md. (1991 and/or those residues forming a hypervariable loop (e.g. residues 26-32 (LCDR1, 50-52 (LCDR2 and 91-96 (LCDR3) in the light chain variable region and 26-32 (HCDR1, 53-55 (HCDR2 and 96-101 (HCDR3) in the heavy chain variable region; Chothia and Lesk (1987) J. Mol. Biol. 196:901-917. Specific CDRs of the invention are described below and shown in FIG. 6A-6D.

[0358] The carboxy-terminal portion of each chain defines a constant region primarily responsible for effector function. Kabat et al. collected numerous primary sequences of the variable regions of heavy chains and light chains. Based on the degree of conservation of the sequences, they classified individual primary sequences into the CDR and the framework and made a list thereof (see SEQUENCES OF IMMUNOLOGICAL INTEREST, 5 th edition, NIH publication, No. 91-3242, E. A. Kabat et al., entirely incorporated by reference).

[0359] In the IgG subclass of immunoglobulins, there are several immunoglobulin domains in the heavy chain. By “immunoglobulin (Ig) domain” herein is meant a region of an immunoglobulin having a distinct tertiary structure. Of interest in the present invention are the heavy chain domains, including, the constant heavy (CH) domains and the hinge domains. In the context of IgG antibodies, the IgG isotypes each have three CH regions. Accordingly, “CH” domains in the context of IgG are as follows: “CH1” refers to positions 118-220 according to the EU index as in Kabat. “CH2” refers to positions 237-340 according to the EU index as in Kabat, and “CH3” refers to positions 341-447 according to the EU index as in Kabat.

[0360] Accordingly, the invention provides variable heavy domains, variable light domains, heavy constant domains, light constant domains and Fc domains to be used as outlined herein. By “variable region” as used herein is meant the region of an immunoglobulin that comprises one or more Ig domains substantially encoded by any of the VK or VA, and/or VH genes that make up the kappa, lambda, and heavy chain immunoglobulin genetic loci respectively. Accordingly, the variable heavy domain comprises vhFR1-vhCDR1-vhFR2-vhCDR2-vhFR3-vhCDR3-vhFR4, and the variable light domain comprises vlFR1-vlCDR1-vlFR2-vlCDR2-vlFR3-vlCDR3-vlFR4. By “heavy constant region” herein is meant the CH1-hinge-CH2-CH3 portion of an antibody. By “Fc” or “Fc region” or “Fc domain” as used herein is meant the polypeptide comprising the constant region of an antibody excluding the first constant region immunoglobulin domain and in some cases, part of the hinge. Thus Fc refers to the last two constant region immunoglobulin domains of IgA, IgD, and IgG, the last three constant region immunoglobulin domains of IgE and IgM, and the flexible hinge N-terminal to these domains. For IgA and IgM, Fc may include the J chain. For IgG, the Fc domain comprises immunoglobulin domains Cy2 and Cy3 (Cy2 and Cy3 and the lower hinge region between Cy1 (Cy1 and Cy2 (Cy2). Although the boundaries of the Fc region may vary, the human IgG heavy chain Fc region is usually defined to include residues C226 or P230 to its carboxyl-terminus, wherein the numbering is according to the EU index as in Kabat. In some embodiments, as is more fully described below, amino acid modifications are made to the Fc region, for example to alter binding to one or more FcγR receptors or to the FcRn receptor.

[0361] Thus, “Fc variant” or “variant Fc” as used herein is meant a protein comprising an amino acid modification in an Fc domain. The Fc variants of the present invention are defined according to the amino acid modifications that compose them. Thus, for example, N434S or 434S is an Fc variant with the substitution serine at position 434 relative to the parent Fc polypeptide, wherein the numbering is according to the EU index. Likewise, M428L/N434S defines an Fc variant with the substitutions M428L and N434S relative to the parent Fc polypeptide. The identity of the WT amino acid may be unspecified, in which case the aforementioned variant is referred to as 428L/434S. It is noted that the order in which substitutions are provided is arbitrary, that is to say that, for example, 428L/434S is the same Fc variant as M428L/N434S, and so on. For all positions discussed in the present invention that relate to antibodies, unless otherwise noted, amino acid position numbering is according to the EU index.

[0362] By “Fab” or “Fab region” as used herein is meant the polypeptide that comprises the VH, CH1, VL, and CL immunoglobulin domains. Fab may refer to this region in isolation, or this region in the context of a full length antibody, antibody fragment or Fab fusion protein. By “Fv” or “Fv fragment” or “Fv region” as used herein is meant a polypeptide that comprises the VL and VH domains of a single antibody. As will be appreciated by those in the art, these generally are made up of two chains.

[0363] Throughout the present specification, either the IMTG numbering system or the Kabat numbering system is generally used when referring to a residue in the variable domain (approximately, residues 1-107 of the light chain variable region and residues 1-113 of the heavy chain variable region) (e.g, Kabat et al., supra (1991)). EU numbering as in Kabat is generally used for constant domains and/or the Fc domains.

[0364] The CDRs contribute to the formation of the antigen-binding, or more specifically, epitope binding site of antibodies. “Epitope” refers to a determinant that interacts with a specific antigen binding site in the variable region of an antibody molecule known as a paratope. Epitopes are groupings of molecules such as amino acids or sugar side chains and usually have specific structural characteristics, as well as specific charge characteristics. A single antigen may have more than one epitope.

[0365] The epitope may comprise amino acid residues directly involved in the binding (also called immunodominant component of the epitope) and other amino acid residues, which are not directly involved in the binding, such as amino acid residues which are effectively blocked by the specifically antigen binding peptide; in other words, the amino acid residue is within the footprint of the specifically antigen binding peptide.

[0366] Epitopes may be either conformational or linear. A conformational epitope is produced by spatially juxtaposed amino acids from different segments of the linear polypeptide chain. A linear epitope is one produced by adjacent amino acid residues in a polypeptide chain. Conformational and nonconformational epitopes may be distinguished in that the binding to the former but not the latter is lost in the presence of denaturing solvents.

[0367] An epitope typically includes at least 3, and more usually, at least 5 or 8-10 amino acids in a unique spatial conformation. Antibodies that recognize the same epitope can be verified in a simple immunoassay showing the ability of one antibody to block the binding of another antibody to a target antigen, for example “binning”. Specific bins are described below.

[0368] Included within the definition of “antibody” is an “antigen-binding portion” of an antibody (also used interchangeably with “antigen-binding fragment”, “antibody fragment” and “antibody derivative”). That is, for the purposes of the invention, an antibody of the invention has a minimum functional requirement that it bind to a IL18-BP antigen. As will be appreciated by those in the art, there are a large number of antigen fragments and derivatives that retain the ability to bind an antigen and yet have alternative structures, including, but not limited to, (i) the Fab fragment consisting of VL, VH, CL and CH1 domains, (ii) the Fd fragment consisting of the VH and CH1 domains, (iii) F(ab′)2 fragments, a bivalent fragment comprising two linked Fab fragments (vii) single chain Fv molecules (scFv), wherein a VH domain and a VL domain are linked by a peptide linker which allows the two domains to associate to form an antigen binding site (Bird et al., 1988, Science 242:423-426, Huston et al., 1988, Proc. Natl. Acad. Sci. U.S.A. 85:5879-5883, entirely incorporated by reference), (iv) “diabodies” or “triabodies”, multivalent or multispecific fragments constructed by gene fusion (Tomlinson et. al., 2000, Methods Enzymol. 326:461-479; WO94/13804; Holliger et al., 1993, Proc. Natl. Acad. Sci. U.S.A. 90:6444-6448, all entirely incorporated by reference), (v) “domain antibodies” or “dAb” (sometimes referred to as an “immunoglobulin single variable domain”, including single antibody variable domains from other species such as rodent (for example, as disclosed in WO 00/29004, nurse shark and Camelid V-HH dAbs, (vi) SMIPs (small molecule immunopharmaceuticals), camelbodies, nanobodies and IgNAR.

[0369] Still further, an antibody or antigen-binding portion thereof (antigen-binding fragment, antibody fragment, antibody portion) may be part of a larger immunoadhesion molecules (sometimes also referred to as “fusion proteins”), formed by covalent or noncovalent association of the antibody or antibody portion with one or more other proteins or peptides. Examples of immunoadhesion molecules include use of the streptavidin core region to make a tetrameric scFv molecule and use of a cysteine residue, a marker peptide and a C-terminal polyhistidine tag to make bivalent and biotinylated scFv molecules. Antibody portions, such as Fab and F(ab′) 2 fragments, can be prepared from whole antibodies using conventional techniques, such as papain or pepsin digestion, respectively, of whole antibodies. Moreover, antibodies, antibody portions and immunoadhesion molecules can be obtained using standard recombinant DNA techniques, as described herein.

[0370] In general, the anti-IL18-BP antibodies of the invention are recombinant. “Recombinant” as used herein, refers broadly with reference to a product, e.g., to a cell, or nucleic acid, protein, or vector, indicates that the cell, nucleic acid, protein or vector, has been modified by the introduction of a heterologous nucleic acid or protein or the alteration of a native nucleic acid or protein, or that the cell is derived from a cell so modified. Thus, for example, recombinant cells express genes that are not found within the native (non-recombinant) form of the cell or express native genes that are otherwise abnormally expressed, under expressed or not expressed at all.

[0371] The term “recombinant antibody”, as used herein, includes all antibodies that are prepared, expressed, created or isolated by recombinant means, such as (a) antibodies isolated from an animal (e.g., a mouse) that is transgenic or transchromosomal for human immunoglobulin genes or a hybridoma prepared therefrom (described further below), (b) antibodies isolated from a host cell transformed to express the human antibody, e.g., from a transfectoma, (c) antibodies isolated from a recombinant, combinatorial human antibody library, and (d) antibodies prepared, expressed, created or isolated by any other means that involve splicing of human immunoglobulin gene sequences to other DNA sequences. Such recombinant human antibodies have variable regions in which the framework and CDR regions are derived from human germline immunoglobulin sequences. In certain embodiments, however, such recombinant human antibodies can be subjected to in vitro mutagenesis (or, when an animal transgenic for human Ig sequences is used, in vivo somatic mutagenesis) and thus the amino acid sequences of the VH and VL regions of the recombinant antibodies are sequences that, while derived from and related to human germline VH and VL sequences, may not naturally exist within the human antibody germline repertoire in vivo.

### A. Anti-IL18-BP Binding Antibody

[0372] The present invention provides anti-IL18-BP antibodies. (For convenience, “anti-IL18-BP antibodies” and “IL18-BP antibodies” are used interchangeably). The anti-IL18-BP antibodies of the invention specifically bind to human IL18-BP, and preferably the secreted chain of human IL18-BP, as depicted in FIG. 28, including, e.g., anti-IL18-BP antibodies including those with CDRs identical to those shown in FIGS. 1, 2 and 3.

[0373] As noted herein and more fully described below, the anti-IL18-BP antibodies (including antigen-binding fragments) that both bind to IL18-BP and block the interaction of IL18-BP and IL18, thereby releasing increased levels of free IL18, are used to enhance T cells, NK cells, NKT cells, Myeloid cells, dendritic cells, MAIT T cells, γδ T cells, and/or innate lymphoid cells (ILCs) activation, proliferation, cytokines and/or chemokines secretion, and can be used in treating diseases such as cancer and pathogen infection.

[0374] Specific binding for IL18-BP or a IL18-BP epitope can be exhibited, for example, by an antibody having a KD of at least about 10⁻⁵ M, at least about 10⁻⁶ M, at least about 10⁻⁷ M, at least about 10⁻⁸ M, at least about 10⁻⁹ M, alternatively at least about 10⁻¹⁰ M, at least about 10⁻¹¹ M, at least about 10⁻¹² M, at least about 10⁻¹³ M, at least about 10⁻¹⁴ M, or greater, where KD refers to a dissociation rate of a particular antibody-antigen interaction. Typically, an antibody that specifically binds an antigen will have a KD that is 20-, 50-, 100-, 500-, 1000-, 5,000-, 10,000-, 100,000- or more times greater for a control molecule relative to the IL18-BP antigen or epitope.

[0375] However, as supported by the Examples, for optimal binding to IL18-BP, the antibodies preferably have a KD (also referred to as the binding affinity) less than 0.01 nM, less 10 nM and most preferably less than 0.1 pM, with less than 1 pM, less than 0.1 pM, and less than 0.01 pM, finding use in the methods of the invention. In some embodiments, the anti-IL-18BP antibodies exhibit a KD less than 900 pM, less than 850 pM, less than 800 pM, less than 750 pM, less than 700 pM, less than 650 pM, less than 600 pM, less than 550 pM, less than 500 pM, less than 450 pM, less than 400 pM, less than 350 pM, less than 300 pM, less than 250 pM, less than 200 pM, less than 150 pM, less than 100 pM, less than 50 pM, or less than 10 pM. In some embodiments, the anti-IL-18BP antibodies exhibit a KD less than 750 pM. In some embodiments, the anti-IL18-BP antibodies of the invention bind to human IL18-BP with a Kp of 50 nM or less, 10 nM or less, or 1 nM or less (that is, higher binding affinity), 100 pM or less, 10 pM or less, 1 pM or less, 0.1 pM or less, or 0.01 pM or less, wherein Kp is determined by known methods, e.g. surface plasmon resonance (SPR, e.g. Biacore instrument), ELISA, KinExA, and most typically SPR at 25° or 37° C. In some embodiments, the anti-IL18-BP antibodies of the invention bind to human IL18-BP with a a KD less than 900 pM, less than 850 pM, less than 800 pM, less than 750 pM, less than 700 pM, less than 650 pM, less than 600 pM, less than 550 pM, less than 500 pM, less than 450 pM, less than 400 pM, less than 350 pM, less than 300 pM, less than 250 pM, less than 200 pM, less than 150 pM, less than 100 pM, less than 50 pM, or less than 10 pM, wherein Kp is determined by known methods, e.g. surface plasmon resonance (SPR, e.g. Biacore instrument), ELISA, KinExA, and most typically SPR at 25° or 37° C. In some embodiments, the antibodies preferably have a KD or binding affinity less than 0.005 pM, 0.01 pM, 0.02 pM, 0.03 pM, 0.04 pM, 0.05 pM, 0.06 pM, 0.07 pM, 0.08 pM, 0.09 pM, 0.10 pM, 0.15 pM, 0.20 pM, 0.25 pM, 0.30 pM, 0.35 pM, 0.40 pM, 0.45 pM, 0.50 pM, 0.55 pM, 0.60 pM, 0.65 pM, 0.70 pM, 0.75 pM, 0.80 pM, 0.85 pM, 0.90 pM, 0.95 pM, or 1 pM.

[0376] Also, specific binding for a particular antigen or an epitope can be exhibited, for example, by an antibody having a KA or Ka for an IL18-BP antigen or epitope of at least 20-, 50-, 100-, 500-, 1000-, 5,000-, 10,000-, 100,000- or more times greater for the epitope relative to a control, where KA or Ka refers to an association rate of a particular antibody-antigen interaction.

[0377] The invention provides antigen binding domains, including full length antibodies, which contain a number of specific, enumerated sets of 6 CDRs, as provided in FIGS. 1, 2, and/or 3. The invention provides antigen binding domains, including full length antibodies, which contain a number of specific, enumerated sets of 6 CDRs, as provided in FIG. 3.

[0378] The invention further provides variable heavy and light domains as well as full length heavy and light chains.

[0379] As discussed herein, the invention further provides variants of the above components, including variants in the CDRs, as outlined above. In addition, variable heavy chains can be at least 80%, at least 90%, at least 95%, at least 98% or at least 99% identical to the “VH” sequences herein, and/or contain from 1, 2, 3, 4, 5, 6, 7, 8, 9, 10 amino acid changes, or more, when Fc variants are used. Variable light chains are provided that can be at least 80%, at least 90%, at least 95%, at least 98% or at least 99% identical to the “VL” sequences herein, and/or contain from 1, 2, 3, 4, 5, 6, 7, 8, 9, 10 amino acid changes, or more, when Fc variants are used. Similarly, heavy and light chains are provided that are at least 80%, at least 90%, at least 95%, at least 98% or at least 99% identical to the “HC” and “LC” sequences herein, and/or contain from 1, 2, 3, 4, 5, 6, 7, 8, 9, 10 amino acid changes, or more, when Fc variants are used.

[0380] Accordingly, the present invention provides antibodies, usually full length or scFv domains, that comprise the following CHA sets of CDRs, the sequences of which are shown in FIG. 1 through 3.

[0381] The 66650 lineage (VH1-03; VL-kappa-1-5) consensus sequence of CDRs (FIG. 1A) was generated using ADI-71701, ADI-71709, ADI-71710, ADI-71707 and ADI-71717 antibodies. The respective sequence alignment is shown in FIG. 3B.

[0382] The 66650 lineage (VH1-03; VL-kappa-1-5) consensus sequence comprises:
[0383] CDR-H1 having the sequence Y-T-F-X-X2-Y-A-X3-H, wherein X is N, R, D, G or K; X2 is S, H, I or Q; X3 is M or V;
[0384] CDR-H2 having the sequence W-I-H-A-G-T-G-X-T-X2-Y-S-Q-K-F-Q-G, wherein X is N, A or V; X2 is K or L;
[0385] CDR-H3 having the sequence A-R-G-L-G-X-V-G-P-T-G-T-S-W-F-D-P, wherein X is S or E;
[0386] CDR-L1 having the sequence R-A-S-Q-G-I-S-S-W-L-A;
[0387] CDR-L2 having the sequence E-A-S-S-L-E-S; and
[0388] CDR-L3 having the sequence Q-Q-Y-R-X-X2-P-F-T, wherein X is S, V, Y, L or Q; X2 is F, S, or G.

[0389] In some embodiments, the anti-IL18-BP antibody comprises the CDRs:
[0390] CDR-H1 having the sequence Y-T-F-X-X2-Y-A-X3-H, wherein X is N, R, D, G or K; X2 is S, H, I or Q; X3 is M or V;
[0391] CDR-H2 having the sequence W-I-H-A-G-T-G-X-T-X2-Y-S-Q-K-F-Q-G, wherein X is N, A or V; X2 is K or L;
[0392] CDR-H3 having the sequence A-R-G-L-G-X-V-G-P-T-G-T-S-W-F-D-P, wherein X is S or E;
[0393] CDR-L1 having the sequence R-A-S-Q-G-I-S-S-W-L-A;
[0394] CDR-L2 having the sequence E-A-S-S-L-E-S; and
[0395] CDR-L3 having the sequence Q-Q-Y-R-X-X2-P-F-T, wherein X is S, V, Y, L or Q; X2 is F, S, or G.

[0396] The 66670 lineage (VH1-69; VL-kappa-1-12) consensus sequence of CDRs (FIG. 1B) was generated using ADI-71719, ADI-71720, ADI-71722, and ADI-71728 antibodies. The respective sequence alignment is shown in FIG. 3C.

[0397] The 66670 lineage (VH1-69; VL-kappa-1-12) consensus sequence comprises:
[0398] CDR-H1 having the sequence G-T-F-X-X2-Y-X3-I-S, wherein X is S or N; X2 is E or S; X3 is V or P;
[0399] CDR-H2 having the sequence G-I-I-P-G-X2-G-T-A-X3-Y-A-Q-K-F-Q-G, wherein X is G or Y, X2 is A or S; X3 is N, I or V;
[0400] CDR-H3 having the sequence A-R-G-R-H-X-H-E-T, wherein X is S, G or F;
[0401] CDR-L1 having the sequence R-A-S-Q-G-I-S-S-W-L-A;
[0402] CDR-L2 having the sequence A-A-S-S-L-Q-S;
[0403] CDR-L3 having the sequence Q-Q-V-Y-X-X2-P-W-T, wherein X is S or R; X2 is L, I or F.

[0404] In some embodiments, the anti-IL18-BP antibody comprises the CDRs:
[0405] CDR-H1 having the sequence G-T-F-X-X2-Y-X3-I-S, wherein X is S or N; X2 is E or S; X3 is V or P;
[0406] CDR-H2 having the sequence G-I-I-P-G-X2-G-T-A-X3-Y-A-Q-K-F-Q-G, wherein X is G or Y, X2 is A or S; X3 is N, I, or V;
[0407] CDR-H3 having the sequence A-R-G-R-H-X-H-E-T, wherein X is S, G or F;
[0408] CDR-L1 having the sequence R-A-S-Q-G-I-S-S-W-L-A;
[0409] CDR-L2 having the sequence A-A-S-S-L-Q-S; and
[0410] CDR-L3 having the sequence Q-Q-V-Y-X-X2-P-W-T, wherein X is S or R; X2 is L, I, or F.

[0411] The 66692 lineage (VH3-23, VL-kappa-1-12) consensus sequence of CDRs (FIG. 1C) was generated using ADI-71662, ADI-71663 and ADI-66692 antibodies. The respective sequence alignment is shown in FIG. 3A.

[0412] The 66692 lineage (VH3-23, VL-kappa-1-12) consensus sequence comprises:
[0413] CDR-H1 having the sequence F-T-F-X-N-X2-A-M-S, wherein X is G or D or S; X2 is T or V or Y;
[0414] CDR-H2 having the sequence A-I-S-X-X1-X2-G-S-T-Y-Y-A-D-S-V-K-G, wherein X is G or A; X2 is N or S; X3 is A or G;
[0415] CDR-H3 having the sequence A-K-G-P-D-R-Q-V-F-D-Y;
[0416] CDR-L1 having the sequence R-A-S-Q-G-I-X-S-W-L-A, wherein X is S or D;
[0417] CDR-L2 having the sequence A-A-S-S-L-Q-S; and
[0418] CDR-L3 having the sequence Q-H-A-X-X1-F-P-Y-T, wherein X is Y or L; X2 is S or F.

[0419] In some embodiments, the anti-IL18-BP antibody comprises the CDRs:
[0420] CDR-H1 having the sequence F-T-F-X-N-X2-A-M-S, wherein X is G or D or S; X2 is T or V or Y;
[0421] CDR-H2 having the sequence A-I-S-X-X1-X2-G-S-T-Y-Y-A-D-S-V-K-G, wherein X is G or A; X2 is N or S; X3 is A or G;
[0422] CDR-H3 having the sequence A-K-G-P-D-R-Q-V-F-D-Y;
[0423] CDR-L1 having the sequence R-A-S-Q-G-I-X-S-W-L-A, wherein X is S or D;
[0424] CDR-L2 having the sequence A-A-S-S-L-Q-S; and
[0425] CDR-L3 having the sequence Q-H-A-X-X1-F-P-Y-T, wherein X is Y or L; X2 is S or F.

[0426] The 66716 lineage (VH1-39; VL-kappa-1-12) consensus sequence of CDRs (FIG. 1D) was generated using ADI-71736, ADI-71739 and ADI-66716 antibodies. The respective sequence alignment is shown in FIG. 3D.

[0427] The 66716 lineage (VH1-39; VL-kappa-1-12) consensus sequence comprises:
[0428] CDR-H1 having the sequence G-S-I-S-S-X-X2-Y-X3-W-G, wherein X is S or P; X2 is E or D; X3 is G, P or Y;
[0429] CDR-H2 having the sequence S-I-X-X2-X3-G-X4-T-Y-Y-N-P-S-L-K-S, wherein X is Y or V; X2 is Y or N; X3 is Q or S; X4 is S or A;
[0430] CDR-H3 having the sequence A-R-G-P-X-R-Q-X2-F-D-Y, wherein X is Y or H, X2 is V or L;
[0431] CDR-L1 having the sequence R-A-S-Q-G-I-S-S-W-L-A;
[0432] CDR-L2 having the sequence A-A-S-S-L-Q-S; and
[0433] CDR-L3 having the sequence Q-Q-G-X-X2-F-P-Y-T, wherein X is S or F; X2 is S or V.

[0434] In some embodiments, the anti-IL18-BP antibody comprises the CDRs:
[0435] CDR-H1 having the sequence G-S-I-S-S-X-X2-Y-X3-W-G, wherein X is S or P; X2 is E or D; X3 is G, P or Y;
[0436] CDR-H2 having the sequence S-I-X-X2-X3-G-X4-T-Y-Y-N-P-S-L-K-S, wherein X is Y or V; X2 is Y or N; X3 is Q or S; X4 is S or A;
[0437] CDR-H3 having the sequence A-R-G-P-X-R-Q-X2-F-D-Y, wherein X is Y or H, X2 is V or L;
[0438] CDR-L1 having the sequence R-A-S-Q-G-I-S-S-W-L-A;
[0439] CDR-L2 having the sequence A-A-S-S-L-Q-S; and
[0440] CDR-L3 having the sequence Q-Q-G-X-X2-F-P-Y-T, wherein X is S or F; X2 is S or V.

[0441] In some embodiments, the anti-IL18-BP antibody comprises the CDRs:
[0442] CDR-H1 having the sequence Y-T-F-X-X2-Y-A-X3-H, wherein X is any amino acid; X2 is any amino acid; X3 is any amino acid;
[0443] CDR-H2 having the sequence W-I-H-A-G-T-G-X-T-X2-Y-S-Q-K-F-Q-G, wherein X is any amino acid; X2 is any amino acid;
[0444] CDR-H3 having the sequence A-R-G-L-G-X-V-G-P-T-G-T-S-W-F-D-P, wherein X is any amino acid;
[0445] CDR-L1 having the sequence R-A-S-Q-G-I-S-S-W-L-A;
[0446] CDR-L2 having the sequence E-A-S-S-L-E-S; and
[0447] CDR-L3 having the sequence Q-Q-Y-R-X-X2-P-F-T, wherein X is any amino acid; X2 is any amino acid.

[0448] In some embodiments, the anti-IL18-BP antibody comprises the CDRs:
[0449] CDR-H1 having the sequence G-T-F-X-X2-Y-X3-I-S, wherein X is any amino acid; X2 is any amino acid; X3 is any amino acid;
[0450] CDR-H2 having the sequence G-I-I-P-G-X2-G-T-A-X3-Y-A-Q-K-F-Q-G, wherein X is any amino acid, X2 is any amino acid;
[0451] CDR-H3 having the sequence A-R-G-R-H-X-H-E-T, wherein X is any amino acid;
[0452] CDR-L1 having the sequence R-A-S-Q-G-I-S-S-W-L-A;
[0453] CDR-L2 having the sequence A-A-S-S-L-Q-S;
[0454] CDR-L3 having the sequence Q-Q-V-Y-X-X2-P-W-T, wherein X is any amino acid; X2 is any amino acid.

[0455] In some embodiments, the anti-IL18-BP antibody comprises the CDRs:
[0456] CDR-H1 having the sequence G-T-F-X-X2-Y-X3-I-S, wherein X is any amino acid; X2 is any amino acid; X3 is any amino acid;
[0457] CDR-H2 having the sequence G-I-I-P-G-X2-G-T-A-X3-Y-A-Q-K-F-Q-G, wherein X is any amino acid; X2 is any amino acid; X3 is any amino acid;
[0458] CDR-H3 having the sequence A-R-G-R-H-X-H-E-T, wherein X is any amino acid;
[0459] CDR-L1 having the sequence R-A-S-Q-G-I-S-S-W-L-A;
[0460] CDR-L2 having the sequence A-A-S-S-L-Q-S;
[0461] CDR-L3 having the sequence Q-Q-V-Y-X-X2-P-W-T, wherein X is any amino acid; X2 is any amino acid.

[0462] In some embodiments, the anti-IL18-BP antibody comprises the CDRs:
[0463] CDR-H1 having the sequence F-T-F-X-N-X2-A-M-S, wherein X is any amino acid; X2 is any amino acid;
[0464] CDR-H2 having the sequence A-I-S-X-X1-X2-G-S-T-Y-Y-A-D-S-V-K-G, wherein X is any amino acid; X2 is any amino acid; X3 is any amino acid;
[0465] CDR-H3 having the sequence A-K-G-P-D-R-Q-V-F-D-Y;
[0466] CDR-L1 having the sequence R-A-S-Q-G-I-X-S-W-L-A, wherein X is any amino acid;
[0467] CDR-L2 having the sequence A-A-S-S-L-Q-S; and
[0468] CDR-L3 having the sequence Q-H-A-X-X1-F-P-Y-T, wherein X is any amino acid; X2 is any amino acid.

[0469] In some embodiments, the anti-IL18-BP antibody comprises the CDRs:
[0470] CDR-H1 having the sequence G-S-I-S-S-X-X2-Y-X3-W-G, wherein X is any amino acid; X2 is any amino acid; X3 is any amino acid;
[0471] CDR-H2 having the sequence S-I-X-X2-X3-G-X4-T-Y-Y-N-P-S-L-K-S, wherein X is any amino acid; X2 is any amino acid; X3 is any amino acid; X4 is any amino acid;
[0472] CDR-H3 having the sequence A-R-G-P-X-R-Q-X2-F-D-Y, wherein X is any amino acid; X2 is any amino acid;
[0473] CDR-L1 having the sequence R-A-S-Q-G-I-S-S-W-L-A;
[0474] CDR-L2 having the sequence A-A-S-S-L-Q-S; and
[0475] CDR-L3 having the sequence Q-Q-G-X-X2-F-P-Y-T, wherein X is any amino acid; X2 is any amino acid.

[0476] In some embodiments, the antibody comprises:
[0477] i. a heavy chain variable domain, comprising:
   [0478] a) CDR-H1 having the sequence Y-T-F-X-X2-Y-A-X3-H, wherein X is N, R, D, G, T, Q, S, A or K; X2 is S, H, I, N, L, Y or Q; X3 is M or V;
   [0479] b) CDR-H2 having the sequence X-I-X2-A-G-X3-X4-X5-T-X6-Y-S-Q-K-F-Q-G, wherein X is W or Y; X2 is H or N; X3 is S, T or A; X4 is G or A; X5 is N, A, T or V; X6 is E, K or L; and
   [0480] c) CDR-H3 having the sequence A-R-G-L-G-X-V-G-P-T-G-T-S-W-F-D-P, wherein X is S, L, A, K or E; and
[0481] ii. a light chain variable domain, comprising:
   [0482] d) CDR-L1 having the sequence R-A-S-Q-G-I-S-S-W-L-A;
   [0483] e) CDR-L2 having the sequence E-A-S-S-E-S, wherein X is L or S; and
   [0484] f) CDR-L3 having the sequence Q-Q-Y-R-X-X2-P-F-T, wherein X is S, V, Y, L, T or Q; X2 is F, S, Y or G.

[0485] In some embodiments, the antibody comprises:
[0486] i. a heavy chain variable domain, comprising:
   [0487] a) CDR-H1 having the sequence G-T-F-X-X2-Y-X3-I-S, wherein X is S or N; X2 is E or S; X3 is V or P
   [0488] b) CDR-H2 having the sequence G-I-I-P-X-X2-G-T-A-X3-Y-A-Q-K-F-Q-G, wherein X is G, S, I or Y; X2 is A, V or S; X3 is N, I or V; and
   [0489] c) CDR-H3 having the sequence A-R-G-R-H-X-H-E-T, wherein X is S, G, or F; and
[0490] ii. a light chain variable domain, comprising:
   [0491] d) CDR-L1 having the sequence R-A-S-Q-G-I-S-S-W-L-A;
   [0492] e) CDR-L2 having the sequence A-A-S-S-L-Q-S; and
   [0493] f) CDR-L3 having the sequence Q-Q-X-Y-X2-X3-P-W-T, wherein X is V or L; X2 is S or R; X3 is L, I or F.

[0494] In some embodiments, the antibody comprises:
[0495] i. a heavy chain variable domain, comprising:
   [0496] a) CDR-H1 having the sequence F-T-F-X-X2-X3-X4-M-S, wherein X is G, S, P or D or S; X2 is N, S or P; X3 is T, V or Y; X4 is A, H or I;
   [0497] b) a CDR-H2 having the sequence A-I-S-X-X2-X3-X4-X5-T-X6-Y-A-D-S-V-K-G, wherein X is G or A; X2 is N, T, E or S; X3 is A or G; X4 is A or G; X5 is S or G; X6 is Y or F; and
   [0498] c) a CDR-H3 having the sequence A-K-G-P-D-R-Q-V-F-D-Y; and
[0499] ii. a light chain variable domain, comprising:
   [0500] d) a CDR-L1 having the sequence R-A-S-Q-G-I-X-S-W-L-A, wherein X is S or D;
   [0501] e) a CDR-L2 having the sequence A-A-S-S-L-Q-S; and
   [0502] f) a CDR-L3 having the sequence Q-H-X-X2-X3-F-P-Y-T, wherein X is A or G;
      [0503] X2 is Y, R or L; X3 is S, R, L or F.

[0504] In some embodiments, the antibody comprises:
[0505] i. a heavy chain variable domain, comprising:
   [0506] a) CDR-H1 having the sequence G-S-I-X-S-X2-X3-Y-X4-W-X5, wherein X is S or F; X2 is S or P; X3 is E or D; X4 is G, P or Y; X5 is G or S;
   [0507] b) CDR-H2 having the sequence X-I-X2-X3-X4-G-X5-T-Y-Y-N-P-S-L-K-S, wherein X is S or V; X2 is Y, V, F or A; X3 is Y, F or N; X4 is Q, A or S; X5 is S, A or N; and
   [0508] c) CDR-H3 having the sequence A-R-G-P-X-R-Q-X2-F-D-Y, wherein X is Y, H or F; X2 is V or L; and
[0509] ii. a light chain variable domain, comprising:
   [0510] d) CDR-L1 having the sequence R-A-S-Q-G-I-S-S-W-L-A;
      [0511] d) CDR-L2 having the sequence A-A-S-S-L-Q-S; and
   [0512] e) CDR-L3 having the sequence Q-Q-G-X-X2-F-P-Y-T, wherein X is S N, W or F; X2 is S or V.

[0513] The anti-IL18-BP antibodies also comprise framework regions. The framework regions of the variable heavy and variable light chains can be humanized as is known in the art (with occasional variants generated in the CDRs as needed), and thus humanized variants of the VH and VL chains of FIGS. 1, 2, and/or 3 can be generated. Furthermore, the humanized variable heavy and light domains can then be fused with human constant regions, such as the constant regions from IgG1, IgG2, IgG3 and IgG4.

[0514] In addition, also included are sequences that may have the identical CDRs but changes in the variable domain (or entire heavy or light chain). For example, IL18-BP antibodies include those with CDRs identical to those shown in FIG. 1-3 but whose identity along the variable region can be lower, for example 85%, 88%, 90%, 92%, 95 or 98% percent identical. For example, IL18-BP antibodies include those with CDRs identical to those shown in FIG. 3 but whose identity along the variable region can be lower, for example 95 or 98% percent identical, and in some embodiments at least 95% or at least 98%.

[0515] The percent identity between two amino acid sequences can be determined using the algorithm of E. Meyers and W. Miller (Comput. Appl. Biosci., 4:11-17 (1988)) which has been incorporated into the ALIGN program (version 2.0, using a PAM120 weight residue table, a gap length penalty of 12 and a gap penalty of 4. In addition, the percent identity between two amino acid sequences can be determined using the Needleman and Wunsch (J. Mol. Biol. 48:444-453 (1970)) algorithm which has been incorporated into the GAP program in the GCG software package (available commercially), using either a Blossum 62 matrix or a PAM250 matrix, and a gap weight of 16, 14, 12, 10, 8, 6, or 4 and a length weight of 1, 2, 3, 4, 5, or 6.

[0516] Additionally or alternatively, the protein sequences of the present invention can further be used as a “query sequence” to perform a search against public databases to, for example, identify related sequences. Such searches can be performed using the XBLAST program (version 2.0) of Altschul, et al. (1990) J. Mol. Biol. 215:403-10. BLAST protein searches can be performed with the XBLAST program, score=50, wordlength=3 to obtain amino acid sequences homologous to the antibody molecules according to at least some embodiments of the invention. To obtain gapped alignments for comparison purposes, Gapped BLAST can be utilized as described in Altschul et al., (1997) Nucleic Acids Res. 25 (17): 3389-3402. When utilizing BLAST and Gapped BLAST programs, the default parameters of the respective programs (e.g., XBLAST and NBLAST) can be used.

[0517] In general, the percentage identity for comparison between IL18-BP antibodies is at least 75%, at least 80%, at least 90%, with at least about 95, 96, 97, 98 or 99% percent identity being preferred. The percentage identity may be along the whole amino acid sequence, for example the entire heavy or light chain or along a portion of the chains. For example, included within the definition of the anti-IL18-BP antibodies of the invention are those that share identity along the entire variable region (for example, where the identity is 95 or 98% identical along the variable regions, and in some embodiments at least 95% or at least 98%), or along the entire constant region, or along just the Fc domain.

### B. Specific Anti-IL18-BP Antibodies

[0518] The invention provides antigen binding domains, including full length antibodies, which contain a number of specific, enumerated sets of 6 CDRs, as well as consensus CDRs (see, e.g., those listed in FIG. 1A-1D).

[0519] The antibodies described herein are labeled as follows. The antibodies have reference numbers, for example “66650 lineage (VH1-03; VL-kappa-1-5)” or “VH1-03” or “ADI-71663 hIgG4 S228P kappa”. This represents the combination of the CDRs and/or the variable heavy and variable light chains, as depicted in FIGS. 1, 2, and/or 3. “ADI-71663.VH” refers to the variable heavy portion of ADI-71663 hIgG4 S228P kappa, while “ADI-71663.VL” is the variable light chain. “ADI-71663.vhCDR1”, “ADI-71663.vhCDR2”, “ADI-71663.vhCDR3”, “ADI-71663.vlCDR1”, “ADI-71663.vlCDR2”, and “ADI-71663.vlCDR3”, refers to the CDRs are indicated. “ADI-71663.HC” refers to the entire heavy chain (e.g., variable and constant domain) of this molecule, and “ADI-71663.LC” refers to the entire light chain (e.g., variable and constant domain) of the same molecule.

[0520] The invention further provides variable heavy and light domains as well as full length heavy and light chains.

[0521] In many embodiments, the antibodies of the invention are human (derived from phage) and block IL18-BP. As shown in FIGS. 1A-1D and 2A-2P, the anti-IL18-BP antibodies, with their components outlined as well:
[0522] CDR-H1, CDR-H2, CDR-H3, CDR-L1, CDR-L2, and CDR-L3 from 66650 lineage (VH1-03; VL-kappa-1-5);
[0523] CDR-H1, CDR-H2, CDR-H3, CDR-L1, CDR-L2, and CDR-L3 from 66670 lineage (VH1-69; VL-kappa-1-12);
[0524] CDR-H1, CDR-H2, CDR-H3, CDR-L1, CDR-L2, and CDR-L3 from 66692 lineage (VH3-23, VL-kappa-1-12);
[0525] CDR-H1, CDR-H2, CDR-H3, CDR-L1, CDR-L2, and CDR-L3 from 66716 lineage (VH1-39; VL-kappa-1-12);
[0526] ADI-71663, ADI-71663.VH, ADI-71663.VL, ADI-71663.HC, ADI-71663.LC and ADI-71663.H1, ADI-71663.H2, ADI-71663.H3, ADI-71663.H4; ADI-71663.vhCDR1, ADI-71663.vhCDR2, ADI-71663.vhCDR3, ADI-71663.vlCDR1, ADI-71663.vlCDR2, and ADI-71663.vlCDR3;
[0527] ADI-71662, ADI-71662.VH, ADI-71662.VL, ADI-71662.HC, ADI-71662.LC and ADI-71662.H1, ADI-71662.H2, ADI-71662.H3, ADI-71662.H4; ADI-71662.vhCDR1, ADI-71664. 71662, ADI-71662.vhCDR3, ADI-71662.vlCDR1, ADI-71662.vlCDR2, and ADI-71662.vlCDR3;
[0528] ADI-71701, ADI-71701.VH, ADI-71701.VL, ADI-71701.HC, ADI-71701.LC and ADI-71701.H1, ADI-71701.H2, ADI-71701.H3, ADI-71701.H4; ADI-71701.vhCDR1, ADI-71701.vhCDR2, ADI-71701.vhCDR3, ADI-71701.vlCDR1, ADI-71701.vlCDR2, and ADI-71701.vlCDR3;
[0529] ADI-71709, ADI-71709.VH, ADI-71709.VL, ADI-71709.HC, ADI-71709.LC and ADI-71709.H1, ADI-71709.H2, ADI-71709.H3, ADI-71709.H4; ADI-71709.vhCDR1, ADI-71709.vhCDR2, ADI-71709.vhCDR3, ADI-71709.vlCDR1, ADI-71709.vlCDR2, and ADI-71709.vlCDR3;
[0530] ADI-71710, ADI-71710.VH, ADI-71710.VL, ADI-71710.HC, ADI-71710.LC and ADI-71710.H1, ADI-71710.H2, ADI-71710.H3, ADI-71710.H4; ADI-71710.vhCDR1, ADI-71710.vhCDR2, ADI-71710.vhCDR3, ADI-71710.vlCDR1, ADI-71710.vlCDR2, and ADI-71710.vlCDR3;
[0531] ADI-71719, ADI-71719.VH, ADI-71719.VL, ADI-71719.HC, ADI-71719.LC and ADI-71719.H1, ADI-71719.H2, ADI-71719.H3, ADI-71719.H4; ADI-71719.vhCDR1, ADI-71719.vhCDR2, ADI-71719.vhCDR3, ADI-71719.vlCDR1, ADI-71719.vlCDR2, and ADI-71719.vlCDR3;
[0532] ADI-71720, ADI-71720.VH, ADI-71720.VL, ADI-71720.HC, ADI-71720.LC and ADI-71720.H1, ADI-71720.H2, ADI-71720.H3, ADI-71720.H4; ADI-71720.vhCDR1, ADI-71720.vhCDR2, ADI-71720.vhCDR3, ADI-71720.vlCDR1, ADI-71720.vlCDR2, and ADI-71720.vlCDR3;
[0533] ADI-71722, ADI-71722.VH, ADI-71722.VL, ADI-71722.HC, ADI-71722.LC and ADI-71722.H1, ADI71722.H2, ADI-71722.H3, ADI-71722.H4; ADI-71722.vhCDR1, ADI-71722.vhCDR2, ADI-71722.vhCDR3, ADI-71722.vlCDR1, ADI-71722.vlCDR2, and ADI-71722.vlCDR3;
[0534] ADI-71717, ADI-71717.VH, ADI-71717.VL, ADI-71717.HC, ADI-71717.LC and ADI-71717.H1, ADI71717.H2, ADI-71717.H3, ADI-71717.H4; ADI-71717.vhCDR1, ADI-71717.vhCDR2, ADI-71717.vhCDR3, ADI-71717.vlCDR1, ADI-71717.vlCDR2, and ADI-71717.vlCDR3;
[0535] ADI-71739, ADI-71739.VH, ADI-71739.VL, ADI-71739.HC, ADI-71739.LC and ADI-71739.H1, ADI71739.H2, ADI-71739.H3, ADI-71739.H4; ADI-71739.vhCDR1, ADI-71739.vhCDR2, ADI-71739.vhCDR3, ADI-71739.vlCDR1, ADI-71739.vlCDR2, and ADI-71739.vlCDR3;
[0536] ADI-71736, ADI-71736.VH, ADI-71736.VL, ADI-71736.HC, ADI-71736.LC and ADI-71736.H1, ADI71736.H2, ADI-71736.H3, ADI-71736.H4; ADI-71736.vhCDR1, ADI-71736.vhCDR2, ADI-71736.vhCDR3, ADI-71736.vlCDR1, ADI-71736.vlCDR2, and ADI-71736.vlCDR3;
[0537] ADI-71707, ADI-71707.VH, ADI-71707.VL, ADI-71707.HC, ADI-71707.LC and ADI-71707.H1, ADI-71707.H2, ADI-71707.H3, ADI-71707.H4; ADI-71707.vhCDR1, ADI-71707.vhCDR2, ADI-71707.vhCDR3, ADI-71707.vlCDR1, ADI-71707.vlCDR2, and ADI-71707.vlCDR3;
[0538] AB-837, AB-837.VH, AB-837.VL, AB-837.HC, AB-837.LC and AB-837 . . . . H1, AB-837.H2, AB-837.H3, AB-837.H4; AB-837.vhCDR1, AB-837.vhCDR2, AB-837.vhCDR3, AB-837.vlCDR1, AB-837.vlCDR2, and AB-837.vlCDR3;
[0539] ADI-66692, ADI-66692.VH, ADI-66692.VL, ADI-66692.HC, ADI-66692.LC and ADI-66692.H1, ADI-66692.H2, ADI-66692.H3, ADI-66692.H4; ADI-66692.vhCDR1, ADI-66692.vhCDR2, ADI-66692.vhCDR3, ADI-66692.vlCDR1, ADI-66692.vlCDR2, and ADI-66692.vlCDR3;
[0540] ADI-66716, ADI-66716.VH, ADI-66716.VL, ADI-66716.HC, ADI-66716.LC and ADI-66716.H1, ADI-66716.H2, ADI-66716.H3, ADI-66716.H4; ADI-66716.vhCDR1, ADI-66716.vhCDR2, ADI-66716.vhCDR3, ADI-66716.vlCDR1, ADI-66716.vlCDR2, and ADI-66716.vlCDR3;
[0541] ADI-71728, ADI-71728.VH, ADI-71728.VL, ADI-71728.HC, ADI-71728.LC and ADI-71728.H1, ADI-71728.H2, ADI-71728.H3, ADI-71728.H4; ADI-71728.vhCDR1, ADI-71728.vhCDR2, ADI-71728.vhCDR3, ADI-71728.vlCDR1, ADI-71728.vlCDR2, and ADI-71728.vlCDR3; or
[0542] ADI-71741, ADI-71741.VH, ADI-71741.VL, ADI-71741.HC, ADI-71741.LC and ADI-71741.H1, ADI71741.H2, ADI-71741.H3, ADI-71741.H4; ADI-71741.vhCDR1, ADI-71741.vhCDR2, ADI-71741.vhCDR3, ADI-71741.vlCDR1, ADI-71741.vlCDR2, and ADI-71741.vlCDR3;
[0543] ADI-71742, ADI-71742.VH, ADI-71742.VL, ADI-71742.HC, ADI-71742.LC and ADI-71742.H1, ADI71742.H2, ADI-71742.H3, ADI-71742.H4; ADI-71742.vhCDR1, ADI-71742.vhCDR2, ADI-71742.vhCDR3, ADI-71742.vlCDR1, ADI-71742.vlCDR2, and ADI-71742.vlCDR3;
[0544] ADI-71744, ADI-71744.VH, ADI-71744.VL, ADI-71744.HC, ADI-71744.LC and ADI-71744.H1, ADI71744.H2, ADI-71744.H3, ADI-71744.H4; ADI-71744.vhCDR1, ADI-71744.vhCDR2, ADI-71744.vhCDR3, ADI-71744.vlCDR1, ADI-71744.vlCDR2, and ADI-71744.vlCDR3;
[0545] ADI-71753, ADI-71753.VH, ADI-71753.VL, ADI-71753.HC, ADI-71753.LC and ADI-71753.H1, ADI71753.H2, ADI-71753.H3, ADI-71753.H4; ADI-71753.vhCDR1, ADI-71753.vhCDR2, ADI-71753.vhCDR3, ADI-71753.vlCDR1, ADI-71753.vlCDR2, and ADI-71753.vlCDR3; or
[0546] ADI71755, ADI-71755.VH, ADI-71755.VL, ADI-71755.HC, ADI-71755.LC and ADI-71755.H1, ADI71755.H2, ADI-71755.H3, ADI-71755.H4; ADI-71755.vhCDR1, ADI-71755.vhCDR2, ADI-71755.vhCDR3, ADI-71755.vlCDR1, ADI-71755.vlCDR2, and ADI-71755.vlCDR3.
   A. IL18-BP Antibodies that Compete for Binding with Enumerated Antibodies

[0547] The present invention provides not only the enumerated antibodies but additional antibodies that compete with the enumerated antibodies (the VH and ADI numbers as enumerated herein that specifically bind to IL18-BP) to specifically bind to the IL18-BP molecule. The IL18-BP antibodies of the invention include antibodies that compete for binding with one or more of the enumerated antibodies, including VH1-03.66650, VH1-69.66670, VH3-23.66692, VH1-39.66716, VL-kappa-1-5-66650, VL-kappa-1-12, 66670, VL-kappa-1-12, 66692, VL-kappa-1-12, ADI-71663, ADI-71662, ADI-66692, ADI-71701, ADI-71709, ADI-71710, ADI-71707, ADI-71717, ADI-71719, ADI-71220, ADI-71722, ADI-71736, ADI-71739, ADI-71728, ADI-66716, ADI-71741, ADI-71742, ADI-71744, ADI-71753, or ADI-71755.

### B. Generation of Additional Antibodies

[0548] Additional antibodies to human IL18-BP can be done as is well known in the art, using well known methods such as those outlined in the examples. Thus, additional anti-IL18-BP antibodies can be generated by traditional methods such as immunizing mice (sometimes using DNA immunization, for example, such as is used by Aldevron), followed by screening against IL18-BP (including human IL18-BP) protein and hybridoma generation, with antibody purification and recovery.

### C. Optional Antibody Engineering

[0549] The anti-IL18-BP antibodies (e.g., anti-IL18-BP antibodies including those with CDRs identical to those shown in FIGS. 1, 2, and/or 3) of the invention can be modified, or engineered, to alter the amino acid sequences by amino acid substitutions.

[0550] By “amino acid substitution” or “substitution” herein is meant the replacement of an amino acid at a particular position in a parent polypeptide sequence with a different amino acid. In particular, in some embodiments, the substitution is to an amino acid that is not naturally occurring at the particular position, either not naturally occurring within the organism or in any organism. For example, the substitution E272Y refers to a variant polypeptide, in this case an Fc variant, in which the glutamic acid at position 272 is replaced with tyrosine. For clarity, a protein which has been engineered to change the nucleic acid coding sequence but not change the starting amino acid (for example exchanging CGG (encoding arginine) to CGA (still encoding arginine) to increase host organism expression levels) is not an “amino acid substitution”; that is, despite the creation of a new gene encoding the same protein, if the protein has the same amino acid at the particular position that it started with, it is not an amino acid substitution.

[0551] As discussed herein, amino acid substitutions can be made to alter the affinity of the CDRs for the IL18-BP protein (including both increasing and decreasing binding, as is more fully outlined below), as well as to alter additional functional properties of the antibodies. For example, the antibodies may be engineered to include modifications within the Fc region, typically to alter one or more functional properties of the antibody, such as serum half-life, complement fixation, Fc receptor binding, and/or antigen-dependent cellular cytotoxicity. Furthermore, an antibody according to at least some embodiments of the invention may be chemically modified (e.g., one or more chemical moieties can be attached to the antibody) or be modified to alter its glycosylation, again to alter one or more functional properties of the antibody. Such embodiments are described further below. The numbering of residues in the Fc region is that of the EU index of Kabat.

[0552] In some embodiments, the hinge region of CH1 is modified such that the number of cysteine residues in the hinge region is altered, e.g., increased or decreased. This approach is described further in U.S. Pat. No. 5,677,425 by Bodmer et al. The number of cysteine residues in the hinge region of CH1 is altered to, for example, facilitate assembly of the light and heavy chains or to increase or decrease the stability of the antibody.

[0553] In another embodiment, the Fc hinge region of an antibody is mutated to decrease the biological half-life of the antibody. More specifically, one or more amino acid mutations are introduced into the CH2-CH3 domain interface region of the Fc-hinge fragment such that the antibody has impaired Staphylococcyl protein A (SpA) binding relative to native Fc-hinge domain SpA binding. This approach is described in further detail in U.S. Pat. No. 6,165,745 by Ward et al.

[0554] In some embodiments, amino acid substitutions can be made in the Fc region, in general for altering binding to FcγR receptors. By “Fc gamma receptor”, “FcγR” or “FcgammaR” as used herein is meant any member of the family of proteins that bind the IgG antibody Fc region and is encoded by an FcγR gene. In humans this family includes but is not limited to FcγRI (CD64, including isoforms FcγRIa, FcγRIb, and FcγRIc; FcγRII (CD32, including isoforms FcγRIIa (including allotypes H131 and R131, FcγRIIb (including FcγRIIb-1 and FcγRIIb-2, and FcγRIIc; and FcγRIII (CD16, including isoforms FcγRIIIa (including allotypes V158 and F158 and FcγRIIIb (including allotypes FcγRIIIb-NA1 and FcγRIIIb-NA2) (Jefferis et al., 2002, Immunol Lett 82:57-65, entirely incorporated by reference), as well as any undiscovered human FcγRs or FcγR isoforms or allotypes. An FcγR may be from any organism, including but not limited to humans, mice, rats, rabbits, and monkeys. Mouse FcγRs include but are not limited to FcγRI (CD64, FcγRII (CD32, FcγRIII-1 (CD16, and FcγRIII-2 (CD16-2, as well as any undiscovered mouse FcγRs or FcγR isoforms or allotypes.

[0555] There are a number of useful Fc substitutions that can be made to alter binding to one or more of the FcγR receptors. Substitutions that result in increased binding as well as decreased binding can be useful. For example, it is known that increased binding to FcγRIIIa generally results in increased ADCC (antibody dependent cell-mediated cytotoxicity; the cell-mediated reaction wherein nonspecific cytotoxic cells that express FcγRs recognize bound antibody on a target cell and subsequently cause lysis of the target cell. Similarly, decreased binding to FcγRIIb (an inhibitory receptor) can be beneficial as well in some circumstances. Amino acid substitutions that find use in the present invention include those listed in U.S. Ser. No. 11/124,620 (particularly FIG. 41) and U.S. Pat. No. 6,737,056, both of which are expressly incorporated herein by reference in their entirety and specifically for the variants disclosed therein. Particular variants that find use include, but are not limited to, 236A, 239D, 239E, 332E, 332D, 239D/332E, 267D, 267E, 328F, 267E/328F, 236A/332E, 239D/332E/330Y, 239D, 332E/330L, 299T and 297N.

[0556] In addition, the antibodies of the invention are modified to increase its biological half-life. Various approaches are possible. For example, one or more of the following mutations can be introduced: T252L, T254S, T256F, as described in U.S. Pat. No. 6,277,375 to Ward. Alternatively, to increase the biological half-life, the antibody can be altered within the CH1 or CL region to contain a salvage receptor binding epitope taken from two loops of a CH2 domain of an Fc region of an IgG, as described in U.S. Pat. Nos. 5,869,046 and 6,121,022 by Presta et al. Additional mutations to increase serum half-life are disclosed in U.S. Pat. Nos. 8,883,973, 6,737,056 and 7,371,826, and include 428L, 434A, 434S, and 428L/434S.

[0557] In yet other embodiments, the Fc region is altered by replacing at least one amino acid residue with a different amino acid residue to alter the effector functions of the antibody. For example, one or more amino acids selected from amino acid residues 234, 235, 236, 237, 297, 318, 320 and 322 can be replaced with a different amino acid residue such that the antibody has an altered affinity for an effector ligand but retains the antigen-binding ability of the parent antibody. The effector ligand to which affinity is altered can be, for example, an Fc receptor or the C1 component of complement. This approach is described in further detail in U.S. Pat. Nos. 5,624,821 and 5,648,260, both by Winter et al.

[0558] In another example, one or more amino acids selected from amino acid residues 329, 331 and 322 can be replaced with a different amino acid residue such that the antibody has altered C1q binding and/or reduced or abolished complement dependent cytotoxicity (CDC). This approach is described in further detail in U.S. Pat. No. 6,194,551 by Idusogie et al.

[0559] In another example, one or more amino acid residues within amino acid positions 231 and 239 are altered to thereby alter the ability of the antibody to fix complement. This approach is described further in PCT Publication WO 94/29351 by Bodmer et al.

[0560] In yet another example, the Fc region is modified to increase the ability of the antibody to mediate antibody dependent cellular cytotoxicity (ADCC) and/or to increase the affinity of the antibody for an Fcγ receptor by modifying one or more amino acids at the following positions: 238, 239, 248, 249, 252, 254, 255, 256, 258, 265, 267, 268, 269, 270, 272, 276, 278, 280, 283, 285, 286, 289, 290, 292, 293, 294, 295, 296, 298, 301, 303, 305, 307, 309, 312, 315, 320, 322, 324, 326, 327, 329, 330, 331, 333, 334, 335, 337, 338, 340, 360, 373, 376, 378, 382, 388, 389, 398, 414, 416, 419, 430, 434, 435, 437, 438 or 439. This approach is described further in PCT Publication WO 00/42072 by Presta. Moreover, the binding sites on human IgG1 for FcγRI, FcγRII, FcγRIII and FcRn have been mapped and variants with improved binding have been described (see Shields, R. L. et al. (2001) J. Biol. Chem. 276:6591-6604). Specific mutations at positions 256, 290, 298, 333, 334 and 339 are shown to improve binding to FcγRIII. Additionally, the following combination mutants are shown to improve FcγRIII binding: T256A/S298A, S298A/E333A, S298A/K224A and S298A/E333A/K334A. Furthermore, mutations such as M252Y/S254T/T256E or M428L/N434S improve binding to FcRn and increase antibody circulation half-life (see Chan C A and Carter P J (2010) Nature Rev Immunol 10:301-316).

[0561] In still another embodiment, the antibody can be modified to abrogate in vivo Fab arm exchange. Specifically, this process involves the exchange of IgG4 half-molecules (one heavy chain plus one light chain) between other IgG4 antibodies that effectively results in bispecific antibodies which are functionally monovalent. Mutations to the hinge region and constant domains of the heavy chain can abrogate this exchange (see, Aalberse, RC, Schuurman J., 2002, Immunology 105:9-19).

[0562] In still another embodiment, the glycosylation of an antibody is modified. For example, an aglycosylated antibody can be made (i.e., the antibody lacks glycosylation). Glycosylation can be altered to, for example, increase the affinity of the antibody for antigen or reduce effector function such as ADCC. Such carbohydrate modifications can be accomplished by, for example, altering one or more sites of glycosylation within the antibody sequence, for example N297. For example, one or more amino acid substitutions can be made that result in elimination of one or more variable region framework glycosylation sites to thereby eliminate glycosylation at that site.

[0563] Additionally or alternatively, an antibody can be made that has an altered type of glycosylation, such as a hypofucosylated antibody having reduced amounts of fucosyl residues or an antibody having increased bisecting GlcNac structures. Such altered glycosylation patterns have been demonstrated to increase the ADCC ability of antibodies. Such carbohydrate modifications can be accomplished by, for example, expressing the antibody in a host cell with altered glycosylation machinery. Cells with altered glycosylation machinery have been described in the art and can be used as host cells in which to express recombinant antibodies according to at least some embodiments of the invention to thereby produce an antibody with altered glycosylation. For example, the cell lines Ms704, Ms705, and Ms709 lack the fucosyltransferase gene, FUT8 (α(1,6) fucosyltransferase), such that antibodies expressed in the Ms704, Ms705, and Ms709 cell lines lack fucose on their carbohydrates. The Ms704, Ms705, and Ms709 FUT8 cell lines are created by the targeted disruption of the FUT8 gene in CHO/DG44 cells using two replacement vectors (see U.S. Patent Publication No. 20040110704 by Yamane et al. and Yamane-Ohnuki et al. (2004) Biotechnol Bioeng 87:614-22). As another example, EP 1,176,195 by Hanai et al. describes a cell line with a functionally disrupted FUT8 gene, which encodes a fucosyl transferase, such that antibodies expressed in such a cell line exhibit hypofucosylation by reducing or eliminating the α 1,6 bond-related enzyme. Hanai et al. also describe cell lines which have a low enzyme activity for adding fucose to the N-acetylglucosamine that binds to the Fc region of the antibody or does not have the enzyme activity, for example the rat myeloma cell line YB2/0 (ATCC CRL 1662). PCT Publication WO 03/035835 by Presta describes a variant CHO cell line, Lec13 cells, with reduced ability to attach fucose to Asn(297)-linked carbohydrates, also resulting in hypofucosylation of antibodies expressed in that host cell (see also Shields, R. L. et al. (2002) J. Biol. Chem. 277:26733-26740). PCT Publication WO 99/54342 by Umana et al. describes cell lines engineered to express glycoprotein-modifying glycosyl transferases (e.g., β(1,4)-N-acetylglucosaminyltransferase III (GnTIII)) such that antibodies expressed in the engineered cell lines exhibit increased bisecting GlcNac structures which results in increased ADCC activity of the antibodies (see also Umana et al. (1999) Nat. Biotech. 17:176-180). Alternatively, the fucose residues of the antibody may be cleaved off using a fucosidase enzyme. For example, the fucosidase α-L-fucosidase removes fucosyl residues from antibodies (Tarentino, A. L. et al. (1975) Biochem. 14:5516-23).

[0564] Another modification of the antibodies herein that is contemplated by the invention is pegylation or the addition of other water-soluble moieties, typically polymers, e.g., in order to enhance half-life. An antibody can be pegylated to, for example, increase the biological (e.g., serum) half-life of the antibody. To pegylate an antibody, the antibody, or fragment thereof, typically is reacted with polyethylene glycol (PEG), such as a reactive ester or aldehyde derivative of PEG, under conditions in which one or more PEG groups become attached to the antibody or antibody fragment. Preferably, the pegylation is carried out via an acylation reaction or an alkylation reaction with a reactive PEG molecule (or an analogous reactive water-soluble polymer). As used herein, the term “polyethylene glycol” is intended to encompass any of the forms of PEG that have been used to derivatize other proteins, such as mono (C₁-C₁₀) alkoxy- or aryloxy-polyethylene glycol or polyethylene glycol-maleimide. In certain embodiments, the antibody to be pegylated is an aglycosylated antibody. Methods for pegylating proteins are known in the art and can be applied to the antibodies according to at least some embodiments of the invention. See for example, EP 0 154 316 by Nishimura et al. and EP 0 401 384 by Ishikawa et al.

[0565] In addition to substitutions made to alter binding affinity to FcγRs and/or FcRn and/or increase in vivo serum half-life, additional antibody modifications can be made, as described in further detail below.

[0566] In some cases, affinity maturation is done. Amino acid modifications in the CDRs are sometimes referred to as “affinity maturation”. An “affinity matured” antibody is one having one or more alteration(s) in one or more CDRs which results in an improvement in the affinity of the antibody for antigen, compared to a parent antibody which does not possess those alteration(s). In some cases, although rare, it may be desirable to decrease the affinity of an antibody to its antigen, but this is generally not preferred.

[0567] In some embodiments, one or more amino acid modifications are made in one or more of the CDRs of the IL18-BP antibodies of the invention. In general, only 1 or 2 or 3-amino acids are substituted in any single CDR, and generally no more than from 1, 2, 3. 4, 5, 6, 7, 8 9 or 10 changes are made within a set of CDRs. However, it should be appreciated that any combination of no substitutions, 1, 2 or 3 substitutions in any CDR can be independently and optionally combined with any other substitution.

[0568] Affinity maturation can be done to increase the binding affinity of the antibody for the IL18-BP antigen by at least about 100% or more, or at least about 10⁴ or more, 10⁵ or more, 10⁶ or more, 10⁷ or more, as compared to the “parent” antibody. Preferred affinity matured antibodies will have nanomolar or even picomolar affinities for the IL18-BP antigen. Affinity matured antibodies are produced by known procedures. See, for example, Marks et al., 1992, Biotechnology 10:779-783 that describes affinity maturation by variable heavy chain (VH) and variable light chain (VL) domain shuffling. Random mutagenesis of CDR and/or framework residues is described in: Barbas, et al., PNAS, USA 91:3809-3813 (1994); Shier et al., Gene, 169:147-155 (1995); Yelton et al., J. Immunol., 155:1994-2004 (1995); Jackson et al., J. Immunol. 154 (7): 3310-9 (1995); and Hawkins et al., J. Mol. Biol., 226:889-896 (1992, for example.

[0569] Alternatively, amino acid modifications can be made in one or more of the CDRs of the antibodies of the invention that are “silent”, e.g. that do not significantly alter the affinity of the antibody for the antigen. These can be made for a number of reasons, including optimizing expression (as can be done for the nucleic acids encoding the antibodies of the invention).

[0570] Thus, included within the definition of the CDRs and antibodies of the invention are variant CDRs and antibodies; that is, the antibodies of the invention can include amino acid modifications in one or more of the CDRs of the enumerated antibodies of the invention. In addition, as outlined below, amino acid modifications can also independently and optionally be made in any region outside the CDRs, including framework and constant regions.

### III. Nucleic Acid Compositions

[0571] Nucleic acid compositions encoding the anti-IL18-BP antibodies of the invention are also provided, as well as expression vectors containing the nucleic acids and host cells transformed with the nucleic acid and/or expression vector compositions. As will be appreciated by those in the art, the protein sequences depicted herein can be encoded by any number of possible nucleic acid sequences, due to the degeneracy of the genetic code.

[0572] The nucleic acid compositions that encode the IL18-BP antibodies will depend on the format of the antibody. For traditional, tetrameric antibodies containing two heavy chains and two light chains are encoded by two different nucleic acids, one encoding the heavy chain and one encoding the light chain. These can be put into a single expression vector or two expression vectors, as is known in the art, transformed into host cells, where they are expressed to form the antibodies of the invention. In some embodiments, for example when scFv constructs are used, a single nucleic acid encoding the variable heavy chain-linker-variable light chain is generally used, which can be inserted into an expression vector for transformation into host cells. The nucleic acids can be put into expression vectors that contain the appropriate transcriptional and translational control sequences, including, but not limited to, signal and secretion sequences, regulatory sequences, promoters, origins of replication, selection genes, etc.

[0573] Preferred mammalian host cells for expressing the recombinant antibodies according to at least some embodiments of the invention include Chinese Hamster Ovary (CHO cells), PER.C6, HEK293 and others as is known in the art.

[0574] The nucleic acids may be present in whole cells, in a cell lysate, or in a partially purified or substantially pure form. A nucleic acid is “isolated” or “rendered substantially pure” when purified away from other cellular components or other contaminants, e.g., other cellular nucleic acids or proteins, by standard techniques, including alkaline/SDS treatment, CsCl banding, column chromatography, agarose gel electrophoresis and others well known in the art.

[0575] To create a scFv gene, the V_{H}- and V_{L}-encoding DNA fragments are operatively linked to another fragment encoding a flexible linker, e.g., encoding the amino acid sequence (Gly₄-Ser)₃ (SEQ ID NO:150, such that the V_{H} and V_{L} sequences can be expressed as a contiguous single-chain protein, with the V_{L} and V_{H} regions joined by the flexible linker (see, e.g., Bird et al., Science 242:423-426 (1988); Huston et al. PNAS, 85:5879-5883 (1988); McCafferty et al., Nature 348:552-554 (1990)).

### IV. Administration of Formulations of Anti-IL18-BP Antibodies

[0576] Administration of the pharmaceutical composition comprising anti-IL18-BP antibodies of the present invention (e.g., anti-IL18-BP antibodies including those with CDRs identical to those shown in FIGS. 1, 2, and/or 3), preferably in the form of a sterile aqueous solution, may be done in a variety of ways, As is known in the art, protein therapeutics are often delivered by IV infusion. The antibodies of the present invention may also be delivered using such methods. For example, administration may be veinous or by intravenous infusion with 0.9% sodium chloride as an infusion vehicle. Such techniques are disclosed in Remington's Pharmaceutical Sciences 16th edition, Osol, A. Ed., 1980.

[0577] The dosing amounts and frequencies of administration are, in some embodiments, selected to be therapeutically or prophylactically effective. As is known in the art, adjustments for protein degradation, systemic versus localized delivery, and rate of new protease synthesis, as well as the age, body weight, general health, sex, diet, time of administration, drug interaction and the severity of the condition may be necessary, and will be ascertainable with routine experimentation by those skilled in the art. In order to treat a patient, a therapeutically effective dose of the Fc variant of the present invention may be administered. By “therapeutically effective dose” herein is meant a dose that produces the effects for which it is administered.

### V. Administration of Formulations of Anti-IL18-BP Antibodies

[0578] Administration of the pharmaceutical composition comprising anti-IL18-BP antibodies of the present invention (e.g., anti-IL18-BP antibodies including those described in FIGS. 1, 2, and/or 3), preferably in the form of a sterile aqueous solution, may be done in a variety of ways, As is known in the art, protein therapeutics are often delivered by IV infusion. The antibodies of the present invention may also be delivered using such methods. For example, administration may venous or by intravenous infusion with 0.9% sodium chloride as an infusion vehicle. Such techniques are disclosed in Remington's Pharmaceutical Sciences 16th edition, Osol, A. Ed., 1980.

[0579] The dosing amounts and frequencies of administration are, in some embodiments, selected to be therapeutically or prophylactically effective. As is known in the art, adjustments for protein degradation, systemic versus localized delivery, and rate of new protease synthesis, as well as the age, body weight, general health, sex, diet, time of administration, drug interaction and the severity of the condition may be necessary, and will be ascertainable with routine experimentation by those skilled in the art. In order to treat a patient, a therapeutically effective dose of the Fc variant of the present invention may be administered. By “therapeutically effective dose” herein is meant a dose that produces the effects for which it is administered.

### VI. Methods of Using the Anti-IL18-BP Antibody

### A. Therapeutic Uses

[0580] The anti-IL18-BP antibodies (e.g., anti-IL18-BP antibodies including those described in FIGS. 1, 2, and/or 3) find use in treating patients, such as human subjects, generally with a condition associated with IL18-BP or free IL18 levels. The term “treatment” as used herein, refers to both therapeutic treatment and prophylactic or preventative measures, which in this example relates to treatment of cancer. Those in need of treatment include those already with cancer as well as those in which the cancer is to be prevented. Hence, the mammal to be treated herein may have been diagnosed as having the cancer or may be predisposed or susceptible to the cancer. As used herein the term “treating” refers to preventing, delaying the onset of, curing, reversing, attenuating, alleviating, minimizing, suppressing, halting the deleterious effects or stabilizing of discernible symptoms of the above-described cancerous diseases, disorders or conditions. It also includes managing the cancer as described above. By “manage” it is meant reducing the severity of the disease, reducing the frequency of episodes of the disease, reducing the duration of such episodes, reducing the severity of such episodes, slowing/reducing cancer cell growth or proliferation, slowing progression of at least one symptom, amelioration of at least one measurable physical parameter and the like. For example, immunostimulatory anti-IL18-BP immune molecules should promote T cells, NK cells, NKT cells, Myeloid cells, Dendritic cells, MAIT T cells, γδ T cells, and/or innate lymphoid cells (ILCs), or cytokine immunity against target cells, e.g., cancer, infected or pathogen cells and thereby treat cancer or infectious diseases by depleting the cells involved in the disease condition.

[0581] The IL18-BP antibodies of the invention are provided in therapeutically effective dosages. A “therapeutically effective dosage” of an anti-IL18-BP immune molecule according to at least some embodiments of the present invention preferably results in a decrease in severity of disease symptoms, an increase in frequency and duration of disease symptom-free periods, an increase in lifespan, disease remission, or a prevention or reduction of impairment or disability due to the disease affliction. For example, for the treatment of IL18-BP positive tumors, a “therapeutically effective dosage” preferably inhibits cell growth or tumor growth by at least about 20%, more preferably by at least about 40%, even more preferably by at least about 60%, and still more preferably by at least about 80% relative to untreated subjects. The ability of a compound to inhibit tumor growth can be evaluated in an animal model system predictive of efficacy in human tumors. Alternatively, this property of a composition can be evaluated by examining the ability of the compound to inhibit, such inhibition in vitro by assays known to the skilled practitioner. A therapeutically effective amount of a therapeutic compound can decrease tumor size, or otherwise ameliorate symptoms in a subject.

[0582] One of ordinary skill in the art would be able to determine a therapeutically effective amount based on such factors as the subject's size, the severity of the subject's symptoms, and the particular composition or route of administration selected.

### 1. Cancer Treatment

[0583] The IL18-BP antibodies of the invention, alone or in combination with other therapeutic agents, find particular use in the treatment of cancer. In general, the antibodies of the invention are immunomodulatory, in that rather than directly attack cancerous cells, the anti-IL18-BP antibodies of the invention stimulate the immune system, generally by inhibiting the action of IL18-BP. Thus, unlike tumor-targeted therapies, which are aimed at inhibiting molecular pathways that are crucial for tumor growth and development, and/or depleting tumor cells, cancer immunotherapy is aimed to stimulate the patient's own immune system to eliminate cancer cells, providing long-lived tumor destruction. Various approaches can be used in cancer immunotherapy, among them are therapeutic cancer vaccines to induce tumor-specific T cell responses, and immunostimulatory antibodies (i.e., antagonists of inhibitory receptors=immune checkpoints) to remove immunosuppressive pathways.

[0584] Clinical responses with targeted therapy or conventional anti-cancer therapies tend to be transient as cancer cells develop resistance, and tumor recurrence takes place. However, the clinical use of cancer immunotherapy in the past few years has shown that this type of therapy can have durable clinical responses, showing dramatic impact on long term survival. However, although responses are long term, only a small number of patients respond (as opposed to conventional or targeted therapy, where a large number of patients respond, but responses are transient).

[0585] By the time a tumor is detected clinically, it has already evaded the immune-defense system by acquiring immunoresistant and immunosuppressive properties and creating an immunosuppressive tumor microenvironment through various mechanisms and a variety of immune cells.

[0586] Accordingly, the anti-IL18-BP antibodies of the invention are useful in treating cancer. Due to the nature of an immuno-oncology mechanism of action, IL18-BP does not necessarily need to be overexpressed on or correlated with a particular cancer type; that is, the goal is to have the anti-IL18-BP antibodies de-suppress T cells, NK cells, NKT cells, Myeloid cells, Dendritic cells, MAIT T cells, γδ T cells, and/or innate lymphoid cells (ILCs) activation, such that the immune system will go after the cancers.

[0587] “Cancer,” as used herein, refers broadly to any neoplastic disease (whether invasive or metastatic) characterized by abnormal and uncontrolled cell division causing malignant growth or tumor (e.g., unregulated cell growth). The term “cancer” or “cancerous” as used herein should be understood to encompass any neoplastic disease (whether invasive, non-invasive or metastatic) which is characterized by abnormal and uncontrolled cell division causing malignant growth or tumor, non-limiting examples of which are described herein. This includes any physiological condition in mammals that is typically characterized by unregulated cell growth.

[0588] “Cancer therapy” herein refers to any method that prevents or treats cancer or ameliorates one or more of the symptoms of cancer. Typically, such therapies will comprise administration of immunostimulatory anti-IL18-BP antibodies (including antigen-binding fragments) either alone or in combination with chemotherapy or radiotherapy or other biologics and for enhancing the activity thereof, i.e., in individuals wherein expression of IL18-BP suppresses antitumor responses and the efficacy of chemotherapy or radiotherapy or biologic efficacy.

[0589] The anti-IL18-BP antibodies of the present invention, as a monotherapy or as part of a combination therapy as described herein, can be used in the treatment of solid tumors (including, for example, cancers of the lung, liver, breast, brain, GI tract) and blood cancers (including for example, leukemia and preleukemic disorders, lymphoma, plasma cell disorders) carcinoma, lymphoma, blastoma, sarcoma, and leukemia or lymphoid malignancies. In some embodiments, the cancer is early. In some embodiments, the cancer is advanced (including metastatic). In some embodiments, the cancers amenable for treatment of the invention include cancers that express IL18-BP and further include non-metastatic or non-invasive, as well as invasive or metastatic cancers, including cancers where IL18-BP expression by immune, stromal, or diseased cells suppresses antitumor responses and anti-invasive immune responses. In some embodiments, the anti-IL18-BP antibodies can be used for the treatment of vascularized tumors. In some embodiments, the cancer for treatment using the anti-IL18-BP antibodies of the present invention includes carcinoma, lymphoma, sarcoma, and/or leukemia. In some embodiments, the cancer for treatment using the anti-IL18-BP antibodies of the present invention includes vascularized tumors, melanoma, non-melanoma skin cancer (squamous and basal cell carcinoma), mesothelioma, squamous cell cancer, lung cancer, small-cell lung cancer, non-small cell lung cancer, neuroendocrine lung cancer (including pleural mesothelioma, neuroendocrine lung carcinoma), NSCL (large cell), NSCLC large cell adenocarcinoma, non-small cell lung carcinoma (NSCLC), NSCLC squamous cell, soft-tissue sarcoma, Kaposi's sarcoma, adenocarcinoma of the lung, squamous carcinoma of the lung, NSCLC with PDL1>=50% TPS, neuroendocrine lung carcinoma, atypical carcinoid lung cancer, cancer of the peritoneum, esophageal cancer, hepatocellular cancer, liver cancer (including HCC), gastric cancer, stomach cancer (including gastrointestinal cancer), pancreatic cancer, glioblastoma, cervical cancer, ovarian cancer, urothelial cancer, bladder cancer, hepatoma, glioma, brain cancer (as well as edema, such as that associated with brain tumors), breast cancer (including, for example, triple negative breast cancer), testis cancer, testicular germ cell tumors, colon cancer, colorectal cancer (CRC), colorectal cancer MSS (MSS-CRC); refractory MSS colorectal; MSS (microsatellite stable status), primary peritoneal cancer, primary peritoneal ovarian carcinoma, microsatellite stable primary peritoneal cancer, platinum resistant microsatellite stable primary peritoneal cancer, CRC (MSS unknown), rectal cancer, endometrial cancer (including endometrial carcinoma), uterine carcinoma, salivary gland carcinoma, kidney cancer, renal cell cancer (RCC), renal cell carcinoma (RCC), gastro-esophageal junction cancer, prostate cancer, vulval cancer, thyroid cancer, hepatic carcinoma, carcinoid carcinoma, head and neck cancer, B-cell lymphoma (including non-Hodgkin's lymphoma, as well as low grade/follicular non-Hodgkin's lymphoma (NHL), small lymphocytic (SL) NHL, intermediate grade/follicular NHL, intermediate grade diffuse NHL, Diffuse Large B cell lymphoma, high grade immunoblastic NHL, high grade lymphoblastic NHL, high grade small non-cleaved cell NHL, bulky disease NHL, mantle cell lymphoma, AIDS-related lymphoma, and Waldenström's Macroglobulinemia, Hodgkin's lymphoma (HD), chronic lymphocytic leukemia (CLL), acute lymphoblastic leukemia (ALL), T cell Acute Lymphoblastic Leukemia (T-ALL), Acute myeloid leukemia (AML), Hairy cell leukemia, chronic myeloblastic leukemia, multiple myeloma, post-transplant lymphoproliferative disorder (PTLD), abnormal vascular proliferation associated with phakomatoses, Meigs' syndrome, Merkel Cell cancer, MSI-high cancer, KRAS mutant tumors, adult T-cell leukemia/lymphoma, adenoid cystic cancer (including adenoid cystic carcinoma), melanoma, malignant melanoma, metastatic melanoma, pancreatic cancer, pancreatic adenocarcinoma, ovarian cancer (including ovarian carcinoma), pleural mesothelioma, cervical squamous cell carcinoma (cervical SCC), anal squamous cell carcinoma (anal SCC), carcinoma of unknown primary, gallbladder cancer, pleural mesothelioma, chordoma, endometrial sarcoma, chondrosarcoma, uterine sarcoma, uveal melanoma, amyloidosis, AL-amyloidosis, astrocytoma, and/or Myelodysplastic syndromes (MDS).

[0590] In some embodiments, the cancer for treatment using the anti-IL18-BP antibodies of the present invention includes cancer selected from the group consisting of renal clear cell carcinoma (RCC), lung cancer, NSCLC, lung adenocarcinoma, lung squamous cell carcinoma, gastric adenocarcinoma, ovarian cancer, endometrial cancer, breast cancer, triple negative breast cancer (TNBC), head and neck tumor, colorectal adenocarcinoma, melanoma, and metastatic melanoma.

### 2. Anti-IL-18BP Antibody Monotherapies

[0591] The IL-18BP antibodies of the invention find particular use in the treatment of cancer as a monotherapy. Due to the nature of an immuno-oncology mechanism of action, IL18-BP does not necessarily need to be overexpressed on or correlated with a particular cancer type; that is, the goal is to have the anti-IL18-BP antibodies de-suppress T cell and NK cell activation, such that the immune system will go after the cancers.

[0592] Any anti-IL-18 antibody of FIG. 1-3 finds use as a monotherapy.

### 3. Anti-IL18BP Antibody Combination Therapies

[0593] As is known in the art, combination therapies comprising a therapeutic antibody targeting an immunotherapy target and an additional therapeutic agent, specific for the disease condition, are showing great promise. For example, in the area of immunotherapy, there are a number of promising combination therapies using a chemotherapeutic agent (either a small molecule drug or an anti-tumor antibody) or with an immuno-oncology antibody.

[0594] The terms “in combination with” and “co-administration” are not limited to the administration of said prophylactic or therapeutic agents at exactly the same time. Instead, it is meant that the antibody and the other agent or agents are administered in a sequence and within a time interval such that they may act together to provide a benefit that is increased versus treatment with only either the antibody of the present invention or the other agent or agents. It is preferred that the antibody and the other agent or agents act additively, and especially preferred that they act synergistically.

[0595] Accordingly, the antibodies of the present invention may be administered concomitantly with one or more other therapeutic regimens or agents. In some embodiments, the antibodies of the present invention are administered in the same formulation with one or more other therapeutic regimens or agents. In some embodiments, the antibodies of the present invention are administered in a separate and/or different formulation from the one or more other therapeutic regimens or agents. The additional therapeutic regimes or agents may be used to improve the efficacy or safety of the antibody. Also, the additional therapeutic regimes or agents may be used to treat the same disease or a comorbidity rather than to alter the action of the antibody. For example, an antibody of the present invention may be administered to the patient along with chemotherapy, radiation therapy, or both chemotherapy and radiation therapy.

[0596] In some embodiment, the anti-IL18 BP antibodies of the invention can be combined with one of a number of checkpoint receptor antibodies. In some embodiments, a patient's tumor may be evaluated for expression of receptors and the results then used to inform a clinician as to which antibodies to administer. Any anti-IL-18 antibody of FIG. 1-3 finds use as part of a combination therapy.

a. Immune Checkpoint Inhibitor Combination Therapies

[0597] In some embodiments, the combination or composition further comprises an additional active agent, e.g., a second antigen binding protein. Optionally, the second antigen binding protein binds to a negative regulator of the immune system, an immune suppressor, or an immune checkpoint protein, including but not limited to PD-1, PD-L1, CTLA-4, PD-L2, B7-H3, B7-H4, CEACAM-1, TIGIT, PVR, LAG3, CD112, PVRIG, CD96, TIM3, and/or BTLA, or co-stimulatory receptor: ICOS, OX40, 41BB, CD27, and/or GITR. All patent documents listed in the section below are incorporated by reference in their entireties for all purposes.

[0598] In some embodiments, the anti-IL18-BP antibodies are used in combination with and antibody to an immune checkpoint inhibitor protein. In some embodiments, the immune checkpoint inhibitor protein is selected from the group consisting of an anti-PVRIG antibody, an anti-PD-1 antibody, an anti-PD-L1 antibody, an anti-TIGIT antibody, an anti-CTLA-4 antibody, an anti-PD-L2 antibody, an anti-B7-H3 antibody, an anti B7-H4 antibody, an anti-CEACAM-1 antibody, an anti-PVR antibody, an anti-LAG3 antibody, an anti-CD112 antibody, an anti-CD96 antibody, an anti-TIM3 antibody, an anti-BTLA antibody, an anti-ICOS antibody, an anti-OX40 antibody, or an anti-41BB antibody, an anti-CD27 antibody, or an anti-GITR antibody.

[0599] In some embodiments, the anti-IL18-BP antibodies are used in combination with one or more anti-PD-1 (e.g., anti-PD-1 targeting antibodies), including for example but not limited to nivolumab (Opdivo®; BMS; CheckMate078, pembrolizumab (KEYTRUDA®; Merck), TSR-042 (Tesaro), cemiplimab (REGN2810; Regeneron Pharmaceuticals, see US20170174779, BMS-936559, Spartalizumab (PDR001, Novartis), pidilizumab (CT-011; Pfizer Inc), Tislelizumab (BGB-A317, BeiGene), Camrelizumab (SHR-1210, Incyte and Jiangsu HengRui), SHR-1210 (CTR20170299 and CTR20170322, SHR-1210 (CTR20160175 and CTR20170090, Sintilimab (Tyvyt®; Eli lily and Innovent Biologics), Toripalimab (JS001, Shanghai Junshi Bioscience), JS-001 (CTR20160274, IBI308 (CTR20160735, BGB-A317 (CTR20160872, Penpulimab (AK105, Akeso Biopharma), Zimberelimab (Arcus), BAT1306 (Bio-Thera Solutions Ltd), Sasanlimab (PF-06801591, pfizer), Dostarlimab-gxly (GlaxoSmithKline LLC), Prolgolimab (Biocad), Cadonilimab (Akeso Inc), Geptanolimab (Genor BioPharma Co Ltd), Serplulimab (Shanghai Henlius Biotech Inc), Balstilimab (Agenus Inc), Retifanlimab (Incyte Corp), Cetrelimab (Johnson & Johnson), CS-1003 (EQRx Inc), IBI-318 (Innovent Biologics Inc), Ivonescimab (Akeso Inc), Pucotenlimab (Lepu Biopharma Co Ltd), QL-1604 (Qilu Pharmaceutical Co Ltd), SCTI-10A (SinoCelltech Group Ltd), Tebotelimab (MacroGenics Inc), AZD-7789 (AstraZeneca Plc), Budigalimab (AbbVie Inc), EMB-02 (EpimAb Biotherapeutics Inc), Ezabenlimab (Boehringer Ingelheim International GmbH), F-520 (Shandong New Time Pharmaceutical Co Ltd), HX-009 (Waterstone Hanxbio Pty Ltd), Zeluvalimab (Amgen), Peresolimab (Eli Lilly and Co), Rosnilimab (AnaptysBio Inc), Vudalimab (Xencor), Izuralimab (Xencor), Lorigerlimab (MacroGenics Inc), YBL-006 (Y-Biologics Inc), ONO-4685 (Ono Pharmaceutical Co Ltd), LY-3434172 (Eli Lilly and Co), and/or a PD-1 antibody as recited in US 2017/0081409 as well as others in development, which can be used in combination with the anti-IL18BP antibodies of the invention. Additional exemplary anti-PD-1 antibody sequences are shown in FIG. 39.

[0600] In some embodiments, pembrolizumab is administered as a dosage of about 2 mg/kg to 10 mg/kg. In some embodiments, pembrolizumab is administered as a dosage of about 2 mg/kg. In some embodiments, pembrolizumab is administered as a dosage of about 2 mg/kg. In some embodiments, pembrolizumab is administered as a dosage of about 3 mg/kg. In some embodiments, pembrolizumab is administered as a dosage of about 4 mg/kg. In some embodiments, pembrolizumab is administered as a dosage of about 5 mg/kg. In some embodiments, pembrolizumab is administered as a dosage of about 6 mg/kg. In some embodiments, pembrolizumab is administered as a dosage of about 7 mg/kg. In some embodiments, pembrolizumab is administered as a dosage of about 8 mg/kg. In some embodiments, pembrolizumab is administered as a dosage of about 9 mg/kg. In some embodiments, pembrolizumab is administered as a dosage of about 10 mg/kg.

[0601] In some embodiments, pembrolizumab is administered as a dosage of about no more than 2 mg/kg. In some embodiments, pembrolizumab is administered as a dosage of about 1 mg/kg to 2 mg/kg. In some embodiments, pembrolizumab is administered as a dosage of about 0.1 mg/kg to 1 mg/kg. In some embodiments, pembrolizumab is administered as a dosage of about 0.01 mg/kg to 0.1 mg/kg.

[0602] In some embodiments, pembrolizumab is administered as a dosage of about at least 10 mg/kg. In some embodiments, pembrolizumab is administered as a dosage of about 10 mg/kg to 20 mg/kg. In some embodiments, pembrolizumab is administered as a dosage of about 20 mg/kg to 30 mg/kg. In some embodiments, pembrolizumab is administered as a dosage of about 30 mg/kg to 40 mg/kg. In some embodiments, pembrolizumab is administered as a dosage of about 40 mg/kg to 50 mg/kg.

[0603] In some embodiments, pembrolizumab is administered about every 1 week to every 6 weeks. In some embodiments, pembrolizumab is administered about every week. In some embodiments, pembrolizumab is administered about every 2 weeks. In some embodiments, pembrolizumab is administered about every 3 weeks. In some embodiments, pembrolizumab is administered about every 4 weeks. In some embodiments, pembrolizumab is administered about every 5 weeks. In some embodiments, pembrolizumab is administered about every 6 weeks.

[0604] In some embodiments, pembrolizumab is administered as a dosage of about 2 mg/kg every 3 weeks. In some embodiments, pembrolizumab is administered as a dosage of about 10 mg/kg every 3 weeks. In some embodiments, pembrolizumab is administered as a dosage of about 200 mg every 3 weeks. In some embodiments, pembrolizumab is administered as a dosage of about 400 mg every 6 weeks.

[0605] In some embodiments, the pembrolizumab is administered over about 10 minutes, over about 15 minutes, over about 20 minutes, over about 25 minutes, over about 30 minutes, over about 35 minutes, or over about 40 minutes. In some embodiments, the pembrolizumab is administered over about 30 minutes+/−10 minutes.

[0606] Further disclosures of pembrolizumab are provided in https://www.accessdata.fda.gov/spl/data/157262d6-15e0-4b0a-968f-b99bab4aef50/157262d6-15e0-4b0a-968f-b99bab4aef50.xml, which is incorporated by reference herein in its entirety.

[0607] In some embodiments, the anti-IL18-BP antibodies are used in combination with one or more anti-PD-L1 antibody (e.g., anti-PD-L1 targeting antibodies). There are three approved anti-PD-L1 antibodies, atezolizumab (TECENTRIQ®; MPDL3280A; IMpower110; Roche/Genentech), avelumab (BAVENCIOR; MSB001071 8C; EMD Serono & Pfizer), and Durvalumab (MEDI4736; IMFINZI®; AstraZeneca). And other antibodies under development, for example, Lodapolimab (LY3300054, Eli Lily), Pimivalimab (Jounce Therapeutics Inc), SHR-1316 (Jiangsu Hengrui Medicine Co Ltd), Envafolimab (Jiangsu Simcere Pharmaceutical Co Ltd), sugemalimab (CStone Pharmaceuticals Co Ltd), cosibelimab (Checkpoint Therapeutics Inc), pacmilimab (CytomX Therapeutics Inc), IBI-318, IBI-322, IBI-323 (Innovent Biologics Inc), INBRX-105 (Inhibrx Inc), KN-046 (Alphamab Oncology), 6MW-3211 (Mabwell Shanghai Bioscience Co Ltd), BNT-311 (BioNTech SE), FS-118 (F-star Therapeutics Inc), GNC-038 (Systimmune Inc), GR-1405 (Genrix (Shanghai) Biopharmaceutical Co Ltd), HS-636 (Zhejiang Hisun Pharmaceutical Co Ltd), LP-002 (Lepu Biopharma Co Ltd), PM-1003 (Biotheus Inc), PM-8001 (Biotheus Inc), STIA-1015 (ImmuneOncia Therapeutics LLC), ATG-101 (Antengene Corp Ltd), BJ-005 (BJ Bioscience Inc), CDX-527 (Celldex Therapeutics Inc), GNC-035 (Systimmune Inc), GNC-039 (Systimmune Inc), HLX-20 (Shanghai Henlius Biotech Inc), JS-003 (Shanghai Junshi Bioscience Co Ltd), LY-3434172 (Eli Lilly and Co), MCLA-145 (Merus NV), MSB-2311 (Transcenta Holding Ltd), PF-07257876 (Pfizer Inc), Q-1802 (QureBio Ltd), QL-301 (QLSF Biotherapeutics Inc), QLF-31907 (Qilu Pharmaceutical Co Ltd), RC-98 (RemeGen Co Ltd), TST-005 (Transcenta Holding Ltd), Atezolizumab (IMpower133, BMS-936559/MDX-1105, and/or RG-7446/MPDL3280A, and/or YW243.55.S70. In some embodiments, the PD-L1 antibody is one described in U.S. Patent Publication No. 2017/0281764 as well as WO 2013/079174 (avelumab) and WO 2010/077634 (or US 2016/0222117 or U.S. Pat. No. 8,217,149; atezolizumab). In some embodiments, the PD-L1 antibody comprises a heavy chain sequence of SEQ ID NO: 34 and a light chain sequence of SEQ ID NO: 36 (from US 2017/281764, as well as others in development, which can be used in combination with the anti-IL18BP antibodies of the invention. Additional exemplary anti-PD-L1 antibody sequences are shown in FIG. 40.

[0608] In some embodiments, the anti-IL18-BP antibodies are used in combination with one or more anti-PD-L2 antibodies (e.g., anti-PD-L2 targeting antibodies). Examples of anti-PD-L2 antibodies include for example but are not limited to anti-PD-L2 antibodies as described in WO 2010/036959, anti-PD-L2 antibodies as described in WO 20140/22758, as well as others in development, which can be used in combination with the anti-IL18-BP antibodies of the invention.

[0609] In some embodiments, the anti-IL18-BP antibodies are used in combination with one or more anti-CTLA-4 antibodies (e.g., anti-CTLA-4 targeting antibodies). Examples of anti-CTLA-4 antibody include for example but are not limited to the FDA approved antibody ipilimumab and tremelimumab. In some embodiments, an anti-CTLA-4 antibodies include for example but are not limited to Yervoy® (ipilimumab or antibody 10D1, described in PCT Publication WO 01/14424, tremelimumab (formerly ticilimumab, CP-675,206, monoclonal or an anti-CTLA-4 antibody described in any of the following publications: WO 98/42752; WO 00/37504; U.S. Pat. No. 6,207,156; Hurwitz et al. (1998) Pro. Natl. Acad. Sci. USA 95 (17): 10067-10071; Camacho et al. (2004) J. Clin. Oncology 22 (145): antibodiestract No. 2505 (antibody CP-675206); and Mokyr et al. (1998) Cancer Res. 58:5301-5304. Any of the anti-CTLA-4 antibodies disclosed in WO2013/173223 can also be used, as well as others in development, which can be used in combination with the anti-IL18-BP antibodies of the invention.

[0610] In some embodiments, the anti-IL18-BP antibodies are used in combination with one or more anti-B7H3 antibodies (e.g., anti-B7H3 targeting antibodies). Examples of anti-B7H3 antibodies include the antibodies under clinical study, for example, Enoblituzumab (MGA271; MacroGenics), and anti-B7H3 antibodies as described WO 2016/033225, anti-B7H3 antibodies as outlined U.S. Pat. No. 9,441,049, as well as others in development, which can be used in combination with the anti-IL18BP antibodies of the invention.

[0611] In some embodiments, the anti-IL18-BP antibodies are used in combination with one or more anti-B7H4 antibodies (e.g., anti-B7H4 targeting antibodies). Examples of anti-B7H4 antibodies include for example but are not limited to anti-B7H4 monoclonal antibody from FivePrime, FPA150, which is currently in clinical phase I, antibodies as described in WO 2022/002012, as well as others in development, which can be used in combination with the anti-IL18BP antibodies of the invention.

[0612] In some embodiments, the anti-IL18-BP antibodies are used in combination with one or more anti-Carcinoembryonic antigen-related cell adhesion molecule-1 antibodies, also known as anti-CEACAM1 antibody, or anti-CD66a antibody. Examples of anti-CEACAM-1 antibodies include for example but are not limited to the antibodies under clinical study, for example, Besilesomab (TheraPharm), AMG211 (Amgen), and CM-24 (MK-6018, KitovPharma). Examples of anti-CEACAM-1 antibodies also include antibodies as outlined in US20200277398A1 (CM-24 in development by Famewave Ltd), antibodies as outlined in U.S. Pat. No. 9,072,797B2 (a CD66-binding component and radionuclide yttrium-90 (90Y)), as well as others in development, which can be used in combination with the anti-IL18-BP antibodies of the invention.

[0613] In some embodiments, the anti-IL18-BP antibodies are used in combination with one or more anti-PVR antibodies (e.g., anti-PVR targeting antibodies). Examples of anti-PVR antibodies include for example but are not limited to antibodies as described in WO 2017/149538, of anti-PVR antibodies include antibodies as described in WO 2021/070181. In some embodiments, the second agent is selected from one or more of an antagonist of PVRL1, PVRL2, PVRL3, PVRL4, and CD155, for example, ASG-22CE (Astellas Pharm/a Inc), Enfortumab (Astellas Pharma), as well as others in development, which can be used in combination with the anti-IL18-BP antibodies of the invention.

[0614] In some embodiments, the anti-IL18-BP antibodies are used in combination with one or more anti-LAG3 antibodies (e.g., anti-LAG3 targeting antibodies). Examples of anti-LAG3 antibodies include for example but are not limited to antibodies under clinical study, for example, LAG525 (Novartis), TSR-033 (Tesaro), Fianlimab (REGN3767, Regeneron), BI-754111 (Boehringer Ingelheim), Sym-022 (Symphogen), RO7247669 (Roch), BMS-986016 (see, WO 2010/019570, GSK2831781 (see, US 2016/0017037, and Merck clones 22D2, 11C9, 4A10, and/or 19E8 (see, WO 2016/028672 and antibodies comprising the CDRs or variable regions of antibodies 25F7, 26H10, 25E3, 8B7, 11F2 or 17E5, which are described in US 2011/0150892, WO 2010/19570 and WO 2014/008218. Other art recognized anti-LAG-3 antibodies that can be used include IMP731 and IMP-321, described in US 2011/007023, WO 2008/132601, and WO 2009/44273. Anti-LAG-3 antibodies that compete with and/or bind to the same epitope as that of any of these antibodies can also be used in combination treatments. as well as others in development, which can be used in combination with the anti-IL18-BP antibodies of the invention.

[0615] In some embodiments, the anti-IL18-BP antibodies are used in combination with one or more anti-CD112 (also referred to as PVRL2; and including e.g., anti-CD112 targeting antibodies)) antibodies. Examples of anti-CD112 antibodies include for example but are not limited to anti-CD112 antibodies as outlined in US 2020/0040081, anti-CD112 antibodies as outlined in US 2019/0040154 or anti-CD112 antibodies as outlined in WO 2017/021526, as well as others in development, which can be used in combination with the anti-IL18-BP antibodies of the invention.

[0616] In some embodiments, the anti-IL18-BP antibodies are used in combination with one or more anti-CD96 antibodies (e.g., anti-CD96 targeting antibodies). Examples of anti-CD96 antibodies include for example but are not limited to anti-CD96 antibodies as outlined in WO 2019/091449, anti-CD96 antibodies as outlined in WO 2021042019, as well as others in development, which can be used in combination with the anti-IL18-BP antibodies of the invention.

[0617] In some embodiments, the anti-IL18-BP antibodies are used in combination with one or more anti-TIM3 antibodies (e.g., anti-TIM3 targeting antibodies). Examples of anti-TIM3 antibodies include antibodies under clinical study, for example, Sabatolimab (Novartis), TSR-022 (Tesaro), INCAGN02385 (Incyte Corporation), INCAGN02390 (Incyte Corporation), BGB-A425 (BeiGene), LY3321367 (Eli Lilly), BMS986258, as well as others in development, which can be used in combination with the anti-IL18-BP antibodies of the invention.

[0618] In some embodiments, the anti-IL18-BP antibodies are used in combination with one or more anti-BTLA antibodies (e.g., anti-BTLA targeting antibodies). Examples of anti-BTLA antibodies include for example but are not limited to JS004 (Shanghai Junshi Bioscience), anti-BTLA antibodies disclosed in WO 2011/014438, as well as others in development, which can be used in combination with the anti-IL18-BP antibodies of the invention.

[0619] In some embodiments, the anti-IL18-BP antibodies are used in combination with one or more anti-ICOS antibodies (e.g., anti-ICOS targeting antibodies). Examples of anti-ICOS antibodies include for example but are not limited to anti-ICOS antibodies under clinical study, for example, MEDI-570 (MedImmune), Vopratelimab (Jounce Therapeutics), KY1044 (Kymab Limited), Feladilimab (GlaxoSmithKline). Examples of anti-ICOS antibodies also include anti-ICOS antibodies as outlined in U.S. Pat. No. 9,957,323, anti-ICOS antibodies as outlined in WO 2016/120789, anti-ICOS antibodies as outlined in WO 2016/154177, as well as others in development, which can be used in combination with the anti-IL18-BP antibodies of the invention.

[0620] In some embodiments, the anti-IL18-BP antibodies are used in combination with one or more anti-OX40 antibodies (e.g., anti-OX-40 targeting antibodies). Examples of anti-OX40 antibodies include for example but are not limited to anti-OX40 antibodies under clinical study, for example, PF-04518600 (Pfizer), BAT6026 (Bio-Thera Solutions), MEDI6469, MEDI-0562, MEDI6962 (MedImmune), BMS 986178, GSK3174998, ABBV-368 (AbbVie), ATOR-1015 (Alligator Bioscience). Examples of anti-OX40 antibodies also include anti-OX40 antibodies as outlined in U.S. Pat. No. 10,730,951, anti-OX40 antibodies as outlined in U.S. Pat. No. 10,851,173, as well as others in development, which can be used in combination with the anti-IL18-BP antibodies of the invention.

[0621] In some embodiments, the anti-IL18-BP antibodies are used in combination with one or more anti-41BB antibodies (e.g., anti-41BB targeting antibodies). Examples of anti-41BB antibodies include for example but are not limited to utomilumab (Pfizer, PF-05082566, LVGN6051 (Lyvgen Biopharma), ATOR-1017 (Alligator Bioscience), BMS-663513, anti-41BB antibodies as outlined in U.S. Pat. No. 10,501,551, as well as others in development, which can be used in combination with the anti-IL18-BP antibodies of the invention.

[0622] In some embodiments, the anti-IL18-BP antibodies are used in combination with one or more anti-CD27 antibodies (e.g., anti-CD27 targeting antibodies). Examples of anti-CD27 antibodies include for example but are not limited to but are not limited to Varlilumab (CDX-1127, Leap Therapeutics), anti-CD27 antibodies as outlined in US 2020/0277393, anti-CD27 antibodies as outlined in WO 2019/195452, as well as others in development, which can be used in combination with the anti-IL18-BP antibodies of the invention.

[0623] In some embodiments, the anti-IL18-BP antibodies are used in combination with one or more anti-GITR antibodies (e.g., anti-GITR targeting antibodies). Clinical study examples of anti-GITR antibodies include for example but are not limited to but are not limited to MK-4166, MK-1248 (Merck Sharp & Dohme), BMS-986156, INCAGN01876 (Incyte Corporation), OMP-336B11 (OncoMed Pharmaceuticals), MEDI1873 (MedImmune). Examples of anti-GITR antibodies also include but are not limited to anti-GITR antibodies as described in n WO 2016/196792, anti-GITR antibody described in WO 2015/187835, the contents of which are herein incorporated by reference, e.g., antibodies having the heavy and light chain variable region CDRs, heavy and light chain variable regions, or heavy and light chains of antibodies 28F3, 19D3, 18E10, 3C3-1, 3C3-2, 2G6, 9G7-1, 9G7-2, 14E3, 19H8-1, 19H8-2, and/or 6G10, and variants thereof. The sequences of the antibodies described in WO 2015/187835 are provided in Table 2 (see SEQ ID NOs: 5-14 and 27-228). The patient may also be treated with any other anti-GITR antibodies, e.g., TRX518 (Leap Therapeutics), MK-4166 (Merck), LKZ-145 (Novartis), GWN-323 (Novartis Pharmaceuticals Corp.), Medi 1873 (Medlmmune), INBRX-110 (Inhibrx), GITR-Fc protein (OncoMed) and antibodies described in WO 2006/105021, WO 2009/009116, WO 2011/028683, US 2014/0072565, US 2014/0072566, US 2014/0065152, WO 2015/031667, WO 2015/184099, WO 2015/184099, or WO 2016/054638.

[0624] In some embodiments, the anti-IL18-BP antibodies are used in combination with one or more anti-TIGIT antibodies. Examples of anti-TIGIT antibodies include for example but are not limited to CPA.9.083.H4(S241P), CPA.9.086.H4(S241P), CHA.9.547.7.H4(S241P), CHA.9.547.13.H4(S241P), CPA.9.018, CPA.9.027, CPA.9.049, CPA.9.057, CPA.9.059, CPA.9.083, CPA.9.086, CPA.9.089, CPA.9.093, CPA.9.101, CPA.9.103, CHA.9.536.3.1, CHA.9.536.3, CHA.9.536.4, CHA.9.536.5, CHA.9.536.7, CHA.9.536.8, CHA.9.560.1, CHA.9.560.3, CHA.9.560.4, CHA.9.560.5, CHA.9.560.6, CHA.9.560.7, CHA.9.560.8, CHA.9.546.1, CHA.9.547.1, CHA.9.547.2, CHA.9.547.3, CHA.9.547.4, CHA. 9.547.6, CHA.9.547.7, CHA.9.547.8, CHA.9.547.9, CHA.9.547.13, CHA.9.541.1, CHA.9.541.3, CHA.9.541.4, CHA.9.541.5, CHA.9.541.6, CHA.9.541.7 and CHA.9.541.8, CHA. 9.547.18 as disclosed in WO 2018/220446 and other antibodies under clinical study, for example, EOS-448 (GlaxoSmithKline, iTeos Therapeutics), BMS-986207, domvanalimab (AB154, Arcus Biosciences, Inc.), AB308 (Arcus Bioscience), Ociperlimab (aBGB-A1217, BeiGene), Tiragolumab (MTIG7192A, Roche), BAT6021 (Bio-Thera Solutions), BAT6005 (Bio-Thera Solutions), IBI939 (Innovent Biologics, US2021/00040201, JS006 (Junshi Bioscience/COHERUS), ASP8374 (Astellas Pharma Inc), Vibostolimab (MK-7684, Merck Sharp & Dohme), M6332 (Merck KGAA), Etigilimab (OMP-313M32, Mereo BioPharma), SEA-TGT (Seagen)y, HB0030 (Huabo Biopharma), AK127 (AKESO), or anti-TIGIT antibodies include the Genentech antibody (MTIG7192A). In some embodiments, the anti-TIGIT antibodies are as described in U.S. Pat. No. 9,713,364 (including MAB1, MAB2, MAB3, MAB4, MAB5, MAB6, MAB7, MAB8, MAB9, MAB10, MAB11, MAB12, MAB13, MAB14, MAB15, MAB16, MAB17, MAB18, 40 MAB19, MAB20, and/or MAB21, anti-TIGIT antibodies are as described in U.S. Pat. No. 9,499,596, anti-TIGIT antibodies are as described in WO 2016/191643, anti-TIGIT antibodies are as described in WO 2017/053748, anti-TIGIT antibodies are as described in WO2016/191643, anti-TIGIT antibodies are as described in WO 2016/028656, anti-TIGIT antibodies are as described in WO 2017/030823, anti-TIGIT antibodies are as described in US 2016/0176963, anti-TIGIT antibodies are as described in WO 2017/037707, anti-TIGIT antibodies are as described in WO 2017/059095, anti-TIGIT antibodies are as described in US2017281764, anti-TIGIT antibodies as described in WO 2015/009856, the anti-TIGIT antibody is an antibody described in any of US 2017/0037133, the anti-TIGIT antibody as described in WO 2017/048824 (including 10A7, 1F4, 14A6, 28H5, 31C6, 15A6, 22G2, 11G11, and/or 10D7) as disclosed in, anti-TIGIT antibody is one of those described in International Patent Publication WO 2016/028656. In some embodiments, the anti-TIGIT antibodies, usually full length or scFv domains, that comprise the following CHA sets of CDRs, the sequences of which are shown in FIG. 30A: CPA.9.083.H4(S241P)vhCDR1, CPA.9.083.H4(S241P)vhCDR2, CPA.9.083.H4(S241P)vhCDR3, CPA.9.083.H4(S241P)vlCDR1, CPA.9.083.H4(S241P)vlCDR2, and CPA.9.083.H4(S241P)vlCDR3. In some embodiments, the anti-TIGIT antibodies, usually full length or scFv domains, that comprise the following CHA sets of CDRs, the sequences of which are shown in FIG. 30B: CPA.9.086.H4(S241P)vhCDR1, CPA.9.086.H4(S241P)vhCDR2, CPA.9.086.H4(S241P)vhCDR3, CPA.9.086.H4(S241P)vlCDR1, CPA.9.086.H4(S241P)vlCDR2, and CPA.9.086.H4(S241P)vlCDR3. Such anti-TIGIT antibodies can be used in combination with the anti-IL18-BP antibodies of the invention. Additional exemplary anti-TIGIT antibody sequences are shown in FIG. 34.

[0625] In some embodiments, the anti-IL18-BP antibodies are used in combination with one or more anti-PVRIG antibodies. Examples of anti-PVRIG antibodies include for example but are not limited to but are not limited to CHA.7.518.1.H4(S241P), CHA.7.538.1.2.H4(S241P), and CHA.7.502, CHA.7.503, CHA.7.506, CHA.7.508, CHA.7.510, CHA. 7.512, CHA. 7.514, CHA.7.516, CHA.7.518.1.H4(S241P), CHA.7.518, CHA.7.518.4, CHA.7.520.1, CHA.7.520.2, CHA.7.522, CHA.7.524, CHA.7.526, CHA.7.527, CHA.7.528, CHA.7.530, CHA.7.534, CHA.7.535, CHA.7.537, CHA.7.538.1.2.H4(S241P), CHA.7.538.1, CHA.7.538.2, CHA.7.543, CHA. 7.544, CHA.7.545, CHA.7.546, CHA.7.547, CHA. 7.548, CHA.7.549, CHA.7.550, CPA.7.001, CPA.7.003, CPA.7.004, CPA.7.006, CPA.7.008, CPA.7.009, CPA.7.010, CPA.7.011, CPA.7.012, CPA.7.013, CPA.7.014, CPA.7.015, CPA.7.017, CPA.7.018, CPA.7.019, CPA.7.021, CPA.7.022, CPA.7.023, CPA.7.024, CPA.7.033, CPA.7.034, CPA.7.036, CPA.7.040, CPA.7.046, CPA.7.047, CPA.7.049, and CPA.7.050, as disclosed in WO 2018/220446A9 and other antibodies under clinical study, for example, GSK4381562/SRF816 (GSK/Surface), NTX2R13 (Nectin Therapeutics). In some embodiments, the antibody sequences is from WO 201/6134333. In some embodiments, the anti-PVRIG antibodies, usually full length or scFv domains, comprise the following CHA sets of CDRs, the sequences of which are shown in FIG. 29A: CHA.7.518.1.H4(S241P)vhCDR1, CHA.7.518.1.H4(S241P)vhCDR2, CHA.7.518.1.H4(S241P)vhCDR3, CHA.7.518.1.H4(S241P)vlCDR1, CHA.7.518.1.H4(S241P)vlCDR2, and CHA.7.518.1.H4(S241P)vlCDR3. In some embodiments, the anti-PVRIG antibodies, usually full length or scFv domains, that comprise the following CHA sets of CDRs, the sequences of which are shown in FIG. 30B: CHA.7.538.1.2.H4(S241P)vhCDR1, CHA.7.538.1.2.H4(S241P)vhCDR2, CHA.7.538.1.2.H4(S241P)vhCDR3, CHA.7.538.1.2.H4(S241P)vlCDR1, CHA.7.538.1.2.H4(S241P)vlCDR2, and CHA.7.538.1.2.H4(S241P)vlCDR3. Such anti-PVRIG antibodies can be used in combination with the anti-IL18-BP antibodies of the invention. Additional exemplary anti-PVRIG antibody sequences are shown in FIGS. 36, 37, and 38.

b. Other Cancer Combination Therapies

[0626] The anti-IL-18BP antibodies of the present invention may be administered in combination with one or more other prophylactic or therapeutic agents, including but not limited to cytotoxic agents, chemotherapeutic agents, cytokines, growth inhibitory agents, anti-hormonal agents, kinase inhibitors, anti-angiogenic agents, cardioprotectants, immunostimulatory agents, immunosuppressive agents, agents that promote proliferation of hematological cells, angiogenesis inhibitors, protein tyrosine kinase (PTK) inhibitors, or other therapeutic agents.

[0627] In this context, a “chemotherapeutic agent” is a chemical compound useful in the treatment of cancer. Examples of chemotherapeutic agents include alkylating agents such as thiotepa and cyclosphosphamide, alkyl sulfonates such as busulfan, improsulfan and piposulfan; aziridines such as benzodopa, carboquone, meturedopa, and uredopa; ethylenimines and methylamelamines including altretamine, triethylenemelamine, triethylenephosphoramide, triethylenethiophosphoramide and trimethylolomelamine; acetogenins (especially bullatacin and bullatacinone); delta-9-tetrahydrocannabinol (dronabinol, MARINOL′); beta-lapachone; lapachol; colchicines; betulinic acid; a camptothecin (including the synthetic analogue topotecan (HYCAMTN®), CPT-11 (irinotecan, CAMPTOSAR®), acetylcamptothecin, scopolectin, and 9-aminocamptothecin); bryostatin; callystatin; CC-1065 (including its adozelesin, carzelesin and bizelesin synthetic analogues); podophyllotoxin; podophyllinic acid; teniposide; cryptophycins (particularly cryptophycin 1 and cryptophycin 8); dolastatin; duocarmycin (including the synthetic analogues, KW-2189 and CB1-TM1); eleutherobin; pancratistatin; a sarcodictyin; spongistatin; nitrogen mustards such as chlorambucil, chlornaphazine, cholophosphamide, estramustine, ifosfamide, mechlorethamine, mechlorethamine oxide hydrochloride, melphalan, novembichin, phenesterine, prednimustine, trofosfamide, uracil mustard; nitrosoureas such as carmustine, chlorozotocin, fotemustine, lomustine, nimustine, and ranimnustine; antibiotics such as the enediyne antibiotics (e.g., calicheamicin, especially calicheamicin gammall and calicheamicin omegall (see, e.g., Agnew, Chem Intl. Ed. Engl., 33:183-186 (1994)); dynemicin, including dynemicin A; an esperamicin; as well as neocarzinostatin chromophore and related chromoprotein enediyne antibiotic chromophores), aclacinomysins, actinomycin, authramycin, azaserine, bleomycins, cactinomycin, carabicin, carminomycin, carzinophilin, chromomycins, dactinomycin, daunorubicin, detorubicin, 6-diazo-5-oxo-L-norleucine, doxorubicin (including morpholino-doxorubicin, cyanomorpholino-doxorubicin, 2-pyrrolino-doxorubicin and deoxydoxorubicin), epirubicin, esorubicin, idarubicin, marcellomycin, mitomycins such as mitomycin C, mycophenolic acid, nogalamycin, olivomycins, peplomycin, porfiromycin, puromycin, quelamycin, rodorubicin, streptonigrin, streptozocin, tubercidin, ubenimex, zinostatin, zorubicin; anti-metabolites such as methotrexate and 5-fluorouracil (5-FU); folic acid analogues such as denopterin, methotrexate, pteropterin, trimetrexate; purine analogs such as fludarabine, 6-mercaptopurine, thiamiprine, thioguanine; pyrimidine analogs such as ancitabine, azacitidine, 6-azauridine, carmofur, cytarabine, dideoxyuridine, doxifluridine, enocitabine, floxuridine; androgens such as calusterone, dromostanolone propionate, epitiostanol, mepitiostane, testolactone; anti-adrenals such as aminoglutethimide, mitotane, trilostane; folic acid replenisher such as frolinic acid; aceglatone; aldophosphamide glycoside; aminolevulinic acid; eniluracil; amsacrine; bestrabucil; bisantrene; edatraxate; defofamine; demecolcine; diaziquone; elfornithine; elliptinium acetate; an epothilone; etoglucid; gallium nitrate; hydroxyurea; lentinan; lonidainine; maytansinoids such as maytansine and ansamitocins; mitoguazone; mitoxantrone; mopidanmol; nitraerine; pentostatin; phenamet; pirarubicin; losoxantrone; 2-ethylhydrazide; procarbazine; PSK® polysaccharide complex (JHS Natural Products, Eugene, Oreg.); razoxane; rhizoxin; sizofiran; spirogermanium; tenuazonic acid; triaziquone; 2,2′,2″-trichlorotriethylamine; trichothecenes (especially T-2 toxin, verracurin A, roridin A and anguidine); urethan; vindesine (ELDISINE®, FILDESIN®); dacarbazine; mannomustine; mitobronitol; mitolactol; pipobroman; gacytosine; arabinoside (“Ara-C”); thiotepa; taxoids, e.g., paclitaxel (TAXOL®; Bristol-Myers Squibb Oncology, Princeton, N.J.), ABRAXANER, cremophor-free, albumin-engineered nanoparticle formulation of paclitaxel (American Pharmaceutical Partners, Schaumberg, Ill.), and docetaxel (TAXOTERE®; Rhone-Poulenc Rorer, Antony, France); chloranbucil; gemcitabine (GEMZARM®); 6-thioguanine; mercaptopurine; methotrexate; platinum analogs such as cisplatin and carboplatin; vinblastine (VELBAN®); platinum; etoposide (VP-16); ifosfamide; mitoxantrone; vincristine (ONCOVIN®); oxaliplatin; leucovovin; vinorelbine (NAVELBINE®); novantrone; edatrexate; daunomycin; aminopterin; ibandronate; topoisomerase inhibitor RFS 2000; difluoromethylornithine (DMFO); retinoids such as retinoic acid; capecitabine (XELODA®); pharmaceutically acceptable salts, acids or derivatives of any of the above; as well as combinations of two or more of the above such as CHOP, an abbreviation for a combined therapy of cyclophosphamide, doxorubicin, vincristine, and prednisolone; CVP, an abbreviation for a combined therapy of cyclophosphamide, vincristine, and prednisolone; and FOLFOX, an abbreviation for a treatment regimen with oxaliplatin (ELOXATIN®) combined with 5-FU and leucovorin.

[0628] In some embodiments, the chemotherapeutic agent is selected from the group consisting of Platinum, Oxaliplatin, Cisplatin, Paclitaxel (taxol), Sorafenib, Doxorubicin, Sorafenib, 5-FU, and Gemcitabine, Irinotecan (CPT-11).

[0629] In some embodiments, the other therapeutic is an agent used in radiation therapy for the treatment of cancer. Accordingly, in some embodiments, the active agents described herein are administered in combination with one or more of platinum coordination compounds, topoisomerase inhibitors, antibiotics, antimitotic alkaloids and difluoronucleosides.

[0630] In some embodiments, the anti-IL18BP antibody is in combination with one or more inflammasome activators. In some embodiments, the inflammasome activator is an CD39 inhibitor. In some embodiments, the CD39 inhibitor is an anti-CD39 antibody.

[0631] According to at least some embodiments, the anti IL18BP antibodies could be used in combination with any of the known in the art standard of care cancer treatment (as can be found, for example, on the World Wide Web at cancer.gov/cancertopics).

### EXAMPLES

### Example 1: Expression of IL18 and IL18BP in the Tumor Microenvironment

[0632] IL18-BP is a sequester for IL18 and results in inhibition of IL18 activity (Dinarello, et al., Front. Immunol., 1:1-10 (2013). Therefore, both IL18-BP, the target of antibody, as well as IL18 need to be present in the TME (Tumor Micro Environment) in order for the blocking of IL18-BP to be effective. FIG. 4 shows the expression of both IL18 (FIG. 4A) and IL18-BP (FIG. 4B) and demonstrated that both proteins are expressed across all TCGA tumors, with only Pheochromocytoma and Paraganglioma (see Table 1 for TCGA tumor type abbreviations; exhibiting somewhat limited expression for IL18 in a subset of these tumor type (reference line at 1RPKM donates background expression levels below it). The eventual target cells for free IL18 are leukocyte/lymphocytes (Tominaga, K., et al., International Immunology, 12 (2): 151-160 (2000 and Senju, H., et al., Int J Biol Sci., 14 (3): 331-340 (2018)), and these studies will target tumors which exhibit higher immune presence, as demonstrated by the IFNγ inflammation signature (see, for example, US 2016/0312295 A1). As can be seen in FIG. 5, both IL18 (FIG. 5A) and IL18-BP (FIG. 5B) were prevalent across all tumor subsets with inflamed tumors (high IFNγ signature values). Even in lowest IFNγ subsets a significant expression of both proteins was detected. As IL18 relies on the inflammasome for its secretion, a signature of core inflammasome genes was generated. These genes are common to multiple types of inflammasome activation signals (Chauhan, D., et al., Immunological Reviews, 297:123-138 (2020)). The signature values were calculated as the mean of the log 10 RPKM expression values of the genes listed in Table 2. As shown in FIG. 6A, the core inflammasome signature was highly expressed in all TMEs, and in general had a higher expression in inflamed (high IFNγ signature) subsets. This pattern was very similar to the one presented for IL18 (FIG. 5A) indicating that the machinery for IL18 was present in all inflamed (high IFNγ signature) tumors and most low IFNγ signature tumors, except for LGG and PCPG. In order to validate that indeed IL18 and the inflammasome core signature genes were expressed in the same cells in the TME single cell data was used and the cosine similarity between IL18, IL18-BP, and the core inflammasome genes was calculated, as well as additional upstream genes and the IL18 receptors. In FIG. 6B, the cosine similarity matrix for macrophages in NSCLC are presented, indicating that indeed IL18 and the core inflammasome signature were present in the same cells. Similar results were obtained in additional tumor types (data not shown). Specifically, in breast cancer it was reported that Triple Negative breast cancer has more inflamed characteristics in about 30% of the cases, as compared to ˜5-10% in hormone receptor positive types (Thomas, F., et al., Frontiers in Oncology, 10:1-17 (2021)). Therefor we checked specifically in the expression of IL18 and IL18-BP in breast cancer by single cell (raw data adopted from Bassez, A., et al., Nature Medicine, 27:820-832 (2021)). In FIG. 7A, it is shown that both IL18 and IL18-BP are more abundant in TNBC, both by percent of expressing cells and average level of expression, flowed by HER2+ subset and with minimal expression in hormone receptor positive subsets, especially in the pre-treatment samples. In this specific dataset the patients were sampled pre-treatment then neoadjuvant treatment with aPD1 or aPD1 with chemotherapy was administered flowed by resection of the tumor (on treatment biopsies). The authors measured T-cell clonality expansion post treatment, T-cell clonal expansion could be regarded as a surrogate measurement for response to aPD1 treatment (Bassez et al., Nature Medicine, 27:820-832 (2021)). FIG. 7B demonstrates that baseline levels of IL18 were lower in non-expanding patients while IL18-BP is higher in these patients. This could be an indicator for the potential role of IL18-BP to attenuate the IL18 activity and hamper the activity of immune checkpoint blockade (ICB) treatment. Both genes were up regulated post aPD1 treatment. These observations strengthen the selection of more inflamed indication in general and specifically TNBC.

### Materials and Methods

### Preprocessing, Filtering, and Normalization

[0633] UMIs were quantified using Cellranger 3.0.2 (10× Genomics) with reference transcriptome GRCh38. Subsequent analyses were performed using “Seurat” (https://satijalab.org/seurat/), if not stated otherwise.

### Clustering and Cell Type Annotation

[0634] Top 15 principal components were used to construct SNN graph and UMAP embedding. Cell annotation for Thomas et al. 2021 was based on authors submitted metadata.

[0635] Cells are clustered by a nested PCA. The clusters are annotated by their gene signatures expression.

[0636] Cosine similarity matrix for a desired set of genes is computed by computing for each pair of genes and their expression vectors the value of formulae (i).

$$\frac{〈 \vec{x} , \vec{y} 〉}{‖ \vec{x} ‖ ‖ \vec{y} ‖} \qquad formulae ( i )$$

[0637] The IFNγ inflammation signature (as described in, US 2016/0312295 A1, incorporate by reference herein in its entirety) is calculated in three steps:
[0638] 1. An IFNγ_up signature is calculated as the mean of the log 10 RPKM expression values of the following genes:
   [0639] CCR5, HLA-DRA, CXCL13, CCL5, STAT1, KLRK1, NKG7, CXCL9, LAIR1, LAG3, CXCR6, KLRD1, GZMA, PRF1, SIGLEC14, PTPN22, CD86, SLA, SIRPG, CD72, HAVCR2, PSTPIP2, SLAMF6, CD84, CD300LF, CD3D, IFNG, CXCL11, CD2, CTSZ, GZMB, IL2RG, CXCL10, LILRB4, PDCD1, CCL8, CIITA, CCL4, IGSF6, PTPRC, CLEC9A, CST7, MYLIP, ITGAL, CDHI, PSTPIP1, GZMK, HLA-E, CD3E, TAGAP, TNFRSF9
[0640] 2. The IFNγ_down signature is calculated as the mean of the log 10 RPKM expression values of the following genes:
   [0641] CLEC3B, NR4A2, EEF1G, PIK3CA, TYRO3, CX3CL1, ING1, BST1, ACKR3, UBB, PPARG, PTEN, THY1, CLCA1, EFEMP1, GAS6, ITM2A, CD55, NFATC1, BCL6, RETNLB, PDCD4, TIMP3, CDO1, POLRIB, DDR1, F2R, CTSG, LILRA5, CX3CR1, TBP, CLEC1B, RGS16, PTPN13, IRF1, MON1B, CPD, PHACTR2, OAZ1, CASP3, IFI16, ITGA1, RPL19, CCR6, LTK, C10orf54, SLAMF1, and TNFAIP8L2
[0642] 3. Finally, the IFNγ inflammation signature is calculated as the difference between the two signatures: IFNγ=IFNγ_up-IFNγ_down.

### Clustering and Cell Type Annotation

[0643] Top 15 principal components were used to construct SNN graph and UMAP embedding.

TABLE 1
TCGA tumor abbreviation

| Study | |
|---|---|
| Abbreviation | Study Name |
| LAML | Acute Myeloid Leukemia |
| ACC | Adrenocortical carcinoma |
| BLCA | Bladder Urothelial Carcinoma |
| LGG | Brain Lower Grade Glioma |
| BRCA | Breast invasive carcinoma |
| CESC | Cervical squamous cell carcinoma |
| | and endocervical adenocarcinoma |
| CHOL | Cholangiocarcinoma |
| LCML | Chronic Myelogenous Leukemia |
| COAD | Colon adenocarcinoma |
| CNTL | Controls |
| ESCA | Esophageal carcinoma |
| FPPP | FFPE Pilot Phase II |
| GBM | Glioblastoma multiforme |
| HNSC | Head and Neck squamous cell carcinoma |
| KICH | Kidney Chromophobe |
| KIRC | Kidney renal clear cell carcinoma |
| KIRP | Kidney renal papillary cell carcinoma |
| LIHC | Liver hepatocellular carcinoma |
| LUAD | Lung adenocarcinoma |
| LUSC | Lung squamous cell carcinoma |
| DLBC | Lymphoid Neoplasm Diffuse Large B-cell Lymphoma |
| MESO | Mesothelioma |
| MISC | Miscellaneous |
| OV | Ovarian serous cystadenocarcinoma |
| PAAD | Pancreatic adenocarcinoma |
| PCPG | Pheochromocytoma and Paraganglioma |
| PRAD | Prostate adenocarcinoma |
| READ | Rectum adenocarcinoma |
| SARC | Sarcoma |
| SKCM | Skin Cutaneous Melanoma |
| STAD | Stomach adenocarcinoma |
| TGCT | Testicular Germ Cell Tumors |
| THYM | Thymoma |
| THCA | Thyroid carcinoma |
| UCS | Uterine Carcinosarcoma |
| UCEC | Uterine Corpus Endometrial Carcinoma |
| UVM | Uveal Melanoma |

TABLE 2
Inflammasome signature.

| | | Enzyme Commission |
|---|---|---|
| Gene name | Synonyms | Number (EC) |
| CASP1 | IL1BC, IL1BCE | 3.4.22.36 |
| CASP4 | ICH2 | 3.4.22.57 |
| CASP5 | ICH3 | 3.4.22.58 |
| PYCARD | ASC, CARD5, TMS1 | |
| GSDMD | DFNA5L, GSDMDC1, | |
| | FKSG10 | |

### Example 2:IL-18BP is a Soluble Immune Checkpoint—RNA Expression Data

### Upregulation of IL-18BP in the TME-TCGA Vs GTEX

[0644] FIG. 47: expression of IL18BP transcripts in normal (green) or cancer (red) tissues from the TCGA and GTEX databases. GBM, glioblastoma multiforme; HSNC, head and neck squamous carcinoma; KIRC, kidney renal clear cell carcinoma; PAAD, pancreatic adenocarcinoma; SKCM, skin cutaneous melanoma; STAD, stomach adenocarcinoma (*P<0.01).

### IL-18BP is Expressed in Suppressive Myeloid Populations and Correlate to PD-L1 in the TME Suggesting Resistance Mechanism

[0645] As shown in FIG. 59A: IL-18BP correlates with PD-L1 at RNA level (TCGA) in colon and breast cancers suggesting a resistance mechanism to immune activation in the tumor microenvironment (TME)

[0646] As shown in FIG. 59B and FIG. 48: Single-cell RNA analyses of tumor-infiltrating myeloid cells, including tumor associated macrophages (TAMs) and dendritic cells (DCs) in colon cancer patients showing that IL-18BP is up-regulated in myeloid population in the TME compared to the periphery (PBMCs), suggesting a resistance mechanism to immune activation in the TME.

[0647] As shown in FIG. 59C: Single-cell RNA analyses of tumor-infiltrating myeloid cells, including tumor associated macrophages (TAMs) and dendritic cells (DCs) across indications showing that IL-18BP is up-regulated in myeloid population in the TME compared to the periphery (PBMCs), suggesting a resistance mechanism to immune activation in the TME

### Upregulation of IL-18BP in Response to ICB Treatment-scRNA/Bulk RNA Data

[0648] FIG. 60A-C: IL-18BP is upregulated (RNA level) following immune checkpoint blockage (ICB) treatment IL-18BP levels are upregulated in the tumor microenvironment (RNA) following treatment with anti-PD-1 (breast and basal cell carcinoma) or anti-PD-1 plus anti CTLA-4 (melanoma) suggesting a potential resistance mechanism.

[0649] FIG. 60D: IL-18BP is elevated in NSCLC patient serum post aPD-(L) 1 treatment Quantification of plasma IL-18BP protein level by ELISA for healthy donors (n=22 and patients with NSCLC (n=52) at baseline before treatment and at the time of the following CT scan after receiving treatment with anti-PD-(L) 1 (n=52).

Association of IL-18BP Levels with Poor Response to aPD-(L) 1 Blockage: 1) RCC (Combo of Pembro+Lenvatinib) and 2) IL18BP in Melanoma Responders/NR (Olink)

[0650] A supportive data for the role of IL-18BP as a soluble ICP and a potential resistance mechanism to PD1 blockage in Renal Cell Carcinoma patients receiving Pembrolizumab plus Lenvatinib. As can be seen in FIG. 61A: High IL-18BP in patient serum pre-treated with Pembrolizumab plus Lenvatinib is associated with shorter progression free survival (PFS). As can be seen in FIG. 61B: High IL-18BP in patient serum is pre-treated with Pembrolizumab plus Lenvatinib associated with stable or progressive disease (SD/PD).

[0651] A supportive data for the role of IL-18BP as a soluble ICP and a potential resistance mechanism to PD1 blockage in melanoma cancer patients receiving anti PD-1 treatment. As can be seen in FIG. 62, high IL-18BP in serum of melanoma cancer patients pre-treated with anti PD-1 is associated with poor response. Raw Olink data (NPX format) Student's T-test was performed for IL18BP protein after intensity normalization for Target products.

### Example 3: Inflammasome Induced Cytokines Such as IL-18 and IL-1B are Abundant in the TME

[0652] Unlike other cytokines, inflammasome induced cytokines such as IL-18 and IL-1b are abundant in the TME.

### Methods:

[0653] Tumor were cut into small pieces with a scalpel and transferred to GentleMACs™ C tubes (Miltenyi Biotec) containing an enzyme mix using human tumor Dissociation Kit (Miltenyi Biotec), as per the manufacturer's protocol. After dissociation, samples were centrifuged at 300 g for 5 minutes and supernatants were collected and recentrifuged at 3130 g for 10 minutes. Following centrifugation, supernatants were recollected and distributed in aliquots for storage at −80c. At the day of the assay, samples were thawed at room temperature and subsequently centrifuged at 14,000 RPM for 10 min and supernatants were collected for immediate usage in ELISAs or CBA with the following kits:
[0654] Human IL18 ELISA kit (MBL, 7620)
[0655] Human Th1/Th2/Th17 cytokine Cytometric Bead Array (CBA) (BD 560484)

### Human Inflammatory Cytokine Cytometric Bead Array (CBA) (BD 551811)

### Results:

[0656] FIG. 71A: IL-18 and IL-1b are inflammasome derived cytokines with opposite effects in the TME. While IL-18 promotes T and NK cell activation and lead to anti tumorigenic activity, IL1b has a dual role and in sum of effects lead to pro-tumorigenic activity.

[0657] FIG. 71B: Dot plot graph shows levels of cytokines in tumor derived supernatants measured across various indications. Each dot represents one sample. The mean is depicted by the short black lines. All other cytokines beside IL-1b and IL-18 were below the lower limit of detection.

### Example 4:IL18 and IL18BP Protein Level in Patient'S Serum Compared with Healthy Donors and Across Indications

### Methods:

[0658] Serum samples from healthy donors and cancer patients were thawed and levels of IL18 analytes (IL18 total, IL18BP) were measured by the following ELISA KITS according to manufacturer's protocol:
[0659] Human IL18 ELISA kit (MBL, 7620)
[0660] Human IL18BP ELISA Kit (R&D DBP180)

### Results:

[0661] FIG. 56A. IL18 analytes levels in patient's serum across indication. FIG. 56B. Dot plot representing IL18 analytes in serum samples from an individual patient or healthy donor. Statistical analysis was preformed using t test (two tailed), P<0.001***. Expression of IL-18 is significantly increased in serum of cancer patients compared with healthy donors, confirming that IL-18 levels are enhanced in the periphery during malignancy.

### Example 5: Higher Level of IL-18 Protein in Serum of Head & Neck Cancer Patients with Tumor'S Site in the Tongue

### Methods:

[0662] Serum samples from Head and Neck cancer patients were thawed and levels of IL18 analytes were measure by the following ELISA KITS according to manufacturer's protocol: Human IL18 ELISA kit (MBL, 7620 and Human IL18BP ELISA Kit (R&D DBP180).

### Results:

[0663] FIG. 63A-B: Principal Component Analysis (PCA) shows that mainly tumor's sites separate between samples with high levels of IL-18 Vs. low levels. Location of tumor in tongue correlates with high levels of IL-18 and lower levels of IL18BP compared with other sites. FIG. 63C. Individual patient's serum levels for IL-18 and IL18BP are shown in dot plots in different tumor's sites.

### Example 6: Levels of IL18BP and IL18 Proteins in the Plasma of NSCLC Patients Treated with Anti-PD1/Anti-PD1 Plus Chemo

### Methods:

[0664] Plasma samples of NSCLC patients were thawed and levels of IL18 and IL18BP were measured by the following ELISA kits according to manufacturer's protocol: Human IL18 ELISA kit (MBL, 7620 and Human IL18BP ELISA Kit (R&D DBP180).

### Results:

[0665] FIG. 65: Plasma of NSCLC patients was collected at baseline and following single dose of anti-PD-1 (Keytruda) (n=8) or following single dose of chemotherapy+ anti-PD-1 (n=14). Clinical assessment of patient's response (responding/non-responding, R/NR) was performed following PET-CT scan after several treatment cycles.

[0666] Average plasma levels of IL18BP and IL18 as measured at baseline, were higher in patients responding to therapies (anti-PD-1 monotherapy or combination of anti-PD-1 and chemotherapy) compared to non-responding patients (FIG. 65A).

[0667] As shown in FIGS. 65B and 65D, patients clinically non-responding to anti-PD-1 monotherapy showed higher plasma levels of IL18 and IL18BP compared to baseline levels, whereas IL18 and IL18BP levels did not significantly change from baseline in patients responding to anti-PD-1 monotherapy. In contrast, only patients clinically responding to a combination of anti-PD-1+chemotherapy showed higher levels of IL18 and IL18BP compared with baseline (FIG. 65C, 65D).

### Discussion:

[0668] NSCLC patients treated with anti-PD1 (Keytruda) most likely express PDL1-CPS>50%, which potentially points to increased immune infiltrate and subsequent increased IFNg expression in the TME. Given that IL18BP is an IFNg-induced gene, this could suggest on a potential immune resistance mechanism in patients treated with anti-PD-1 and support the rational for a combined anti-IL18BP and anti-PD1 blockade to further increase patient's potential anti-tumor responses. Patients receiving combined treatment of chemotherapy+ anti-PD-1, are PDL1-CPS<50%, and tend to have greater tumor masses. Patients responding clinically to anti-PD-1+chemotherapy combination, may have a potential increase in infiltration of immune cells which may secrete IL18, and a subsequent induction in IFNg levels which may potentially result in increase of IL18BP secretion. The clinical anti-tumor responses in these patients could be potentiated with anti-IL18BP antibodies.

### Example 7:IL18 and IL18BP Protein Levels in Tumor Derived Supernatants (TDS)

### Methods:

[0669] Tumor were cut into small pieces with a scalpel and transferred to GentleMACs™ C tubes (Miltenyi Biotec) containing an enzyme mix using human tumor Dissociation Kit (Miltenyi Biotec), as per the manufacturer's protocol. After dissociation, samples were centrifuged at 300 g for 5 minutes and supernatants were collected and recentrifuged at 3130 g for 10 minutes. Following centrifugation, supernatants were recollected and distributed in aliquots for storage at −80° C. At the day of the assay, samples were thawed at room temperature and subsequently centrifuged at 14,000 RPM for 10 min and supernatants were collected for immediate usage in ELISAs with the following kits:
[0670] Human IL18 ELISA kit (MBL, 7620)
[0671] Human IL18BP ELISA Kit (R&D DBP180)

### Results:

[0672] IL-18 and IL-18BP were detected in TDS across various indications.

[0673] FIG. 57. Dot plot representing IL18 and IL18BP in TDS samples from individual patients. FIG. 58. IL18 and IL18BP levels in patient's TDS across indication.

### Example 8:IL18RA is Expressed on TILS in the TME and its Expression is Induced on CD4 Tils Compared with Periphery

### Methods:

[0674] Tumor samples were cut into small pieces with a scalpel and transferred to GentleMACs™ C tubes (Miltenyi Biotec) containing an enzyme mix. After dissociation, cells were filtered through a 70 μm filter. Single-cell suspensions were seed into a 96-well V-bottomed plate and a cocktail of antibodies (Abs) to CD16 (BioLegend), CD32 (Thermo Fisher), and CD64 (BioLegend) were used to block Fc receptors. Immune populations were stained with anti-human IL18Ra or using its isotype control (BioLegend. After wash (1% BSA, 0.1% sodium azide, in PBS), cells were acquired on FACS Fortessa cytometer (BD Bioscience). Analysis was done using FlowJo.

### Results:

[0675] IL-18Ra expression is induced on tumor infiltrating T cells compared with matched PBMCs, with a statistical significance on CD4+ T cells, and a trend on CD8+ T cells.

[0676] FIG. 55A. Expression of IL18Ra on CD8⁺ and CD4⁺ and NK TILs from dissociated human tumors of various cancer types is shown. Each dot represents a distinct tumor from an individual patient. Fold expression value was calculated by dividing the MFI of a target by the MFI of the relevant isotype control. (FOI). Average and SEM is shown by the ticks. FIG. 55B, Expression of IL18Ra on CD4+ and CD8⁺ T and NK cells from donor-matched PBMCs and TME. Statistical analysis was preformed using paired t test (two tailed), P<0.05; ** p=0.0064

### Example 9: Co-Expression of Tigit and IL18Ra within the TME

[0677] Tumor samples were mechanically disassociated and enzymatically digested using Milteny's human tumor disassociation kit (according to manufacturer's instructions). Single-cell suspensions were stained with Zombie-Nir to exclude dead cells and stained with the antibodies against CD45, CD3, CD4, CD8, CD56, TIGIT or IL18Ra. Cells were acquired on FACS Fortessa cytometer (BD Bioscience) and analyzed with FlowJo software (V10). Cell surface markers were used to detect the following immune populations: CD8 (CD3+CD8+), CD4 (CD3+CD4+), NK (CD3-CD56+) and NKT (CD3+CD56+).

[0678] The results are shown in FIG. 33, presenting Flow cytometry dot plots showing co-expression of IL18Ra and TIGIT in the endometrium and colon TME, on CD8 T cells, CD4 T cells, NKs, and NKT cells. The co-expression of TIGIT and IL18Ra on same cells indicates that targeting both pathways by combined administration of inhibitory anti-IL18BP and anti-TIGIT antibodies might have a beneficial effect.

### Example 10: Generation and Characterization of Custom ABS Against Human IL18-BP Protein by Adimab LTD

Generation of Anti IL18-BP hIgG1-N297A Abs Against Human IL18-BP Protein

### Antigen Preparation

[0679] Antigens were biotinylated using the EZ-Link Sulfo-NHS-Biotinylation Kit (Thermo Scientific, Cat #21425).

[0680] The antigens were concentrated to ˜1 mg/mL and buffer exchanged into PBS before addition of 1:7.5 molar ratio biotinylation reagent. The mixture was held at 4C overnight prior to another buffer exchange to remove free biotin in the solution. Biotinylation was confirmed through streptavidin sensor binding of the labeled proteins on a ForteBio.

### Naïve Library Selections

[0681] Eight naïve human synthetic yeast libraries each of ˜109 diversity were propagated as previously described (see, e.g., Y. Xu et al, PEDS 26 (10, 663-70 (2013); WO2009036379; WO2010105256; and WO2012009568.)

[0682] For the first two rounds of selection, a magnetic bead sorting technique utilizing the Miltenyi MACS system was performed, as previously described (see, e.g., Siegel et al, J Immunol Methods 286 (1-2, 141-153 (2004).) Briefly, yeast cells (˜10¹⁰ cells/library) were incubated with 10 nM biotinylated human IL18-BP-Fc fusion for 30 min at 30° C. in wash buffer (phosphate-buffered saline (PBS)/0.1% bovine serum albumin (BSA)). After washing once with 40 mL ice-cold wash buffer, the cell pellet was resuspended in 20 mL wash buffer, and Streptavidin MicroBeads (500 μl) were added to the yeast and incubated for 15 min at 4° C. Next the yeast were pelleted, resuspended in 5 mL wash buffer, and loaded onto a Miltenyi LS column. After the 5 mL were loaded, the column was washed 3 times with 3 mL wash buffer. The column was then removed from the magnetic field, and the yeast were eluted with 5 mL of growth media and then grown overnight.

[0683] The following rounds of selection were performed using flow cytometry (FACS). Yeast were pelleted, washed three times with wash buffer, and incubated at 30° C. with either 10 nM biotinylated human IL18-BP-Fc fusion, 10 nM biotinylated cyno IL18-BP-Fc fusion, 100 nM human IL18-BP-Fc monomer, 100 nM biotinylated cyno IL18-BP monomer, or with a polyspecificity reagent (PSR) to remove non-specific antibodies from the selection. Some selections were also performed to enrich for IL18 competitive antibodies by incubating with biotinylated human IL18-BP-Fc fusion precomplexed to human IL18. For the PSR depletion, the libraries were incubated with a 1:10 dilution of biotinylated PSR reagent as previously described (see, e.g., Y. Xu et al, PEDS 26 (10, 663-70 (2013).) Yeast were then washed twice with wash buffer and stained with goat F(ab′)₂ anti-human kappa-FITC (LC-FITC) diluted 1:100 (Southern Biotech, Cat #2062-02 and either Streptavidin-AF633 (SA-633) diluted 1:500 (Life Technologies, Cat #S21375) or Extravidin-_phycoerythrin (EA-PE) diluted 1:50 (Sigma-Aldrich, Cat #E4011, secondary reagents for 15 min at 4° C. After washing twice with ice-cold wash buffer, the cell pellets were resuspended in 0.3 mL wash buffer and transferred to strainer-capped sort tubes. Sorting was performed using a FACS ARIA sorter (BD Biosciences) and sort gates were determined to select for antibodies with desired characteristics. Selection rounds were repeated until a population with all of the desired characteristics was obtained. After the final round of sorting, yeast were plated and individual colonies were picked for characterization.

### Antibody Optimization

[0684] Optimization of antibodies was performed via a light chain batch shuffle, and then by introducing diversities into the heavy chain and light chain variable regions as described below. A combination of some of these approaches was used for each antibody.

[0685] Light chain batch shuffle: Heavy chains from the naïve output were used to prepare light chain diversification libraries. Selections were performed on these libraries as described above, i.e., with one round of MACS and four rounds of FACS. In the different FACS selection rounds, the libraries were evaluated for, e.g., PSR binding and affinity pressure by antigen titration. Sorting was performed in order to obtain a population with the desired characteristics. Individual colonies from each terminal FACS selection round were picked for sequencing and characterization.

[0686] CDRH1 and CDRH2 selection: The CDRH3 of a single antibody was recombined into a premade library with CDRH1 and CDRH2 variants of a diversity of ˜10⁸ and selections were performed with one round of MACS and four rounds of FACS as described in the naïve selections. For each FACS round the libraries were looked at for PSR binding and affinity pressure, and sorting was performed in order to obtain a population with the desired characteristics.

[0687] CDRH3 and CDRL3 selection: Oligos were ordered from IDT which comprised the CDRH3 and the CDRL3 as well as a flanking region on either side of the CDR3. Each oligo variegated one or two amino acids in the CDR3 via NNK diversity. The CDRH3 oligos were recombined with heavy chain FR1-FR3 variable regions containing selected variants from the CDRH1 and CDRH2 selections, and the CDRL3 oligos were recombined with the light chain FR1-FR3 variable regions from the parental antibody, for a combined library diversity of ˜10⁸. Selections were performed with one round of MACS and four rounds of FACS as described in the naïve selections. For each FACS round the libraries were looked at for PSR binding and affinity pressure, and sorting was performed in order to obtain a population with the desired characteristics. For these selections affinity pressures were applied by preincubating the antigen with parental IgG for 30 minutes and then applying that precomplexed mixture to the yeast library for a length of time which would allow the selection to reach an equilibrium. The higher affinity antibodies were then able to be sorted.

### Antibody Production and Purification

[0688] Yeast clones were grown to saturation and then induced for 48 h at 30° C. with shaking. After induction, yeast cells were pelleted, and the supernatants were harvested for purification. IgGs were purified using a Protein A column and eluted with acetic acid, pH 3.5.

### Size Exclusion Chromatography

[0689] A TSKgel SuperSW mAb HTP column (22855) was used for fast SEC analysis of mammalian produced mAbs at 0.4 mL/min with a cycle time of 6 min/run. 200 mM Sodium Phosphate and 250 mM Sodium Chloride was used as the mobile phase.

### Dynamic Scanning Fluorimetry

[0690] 10 μL of 20× Sypro Orange is added to 20 μL of 0.2-1 mg/ml mAb or Fab solution. A RT-PCR instrument (BioRad CFX96 RT PCR) is used to ramp the sample plate temperature from 40 to 95 C at 0.5 C increment, with 2 min equilibrate at each temperature. The negative of first derivative for the raw data is used to extract Tm.

TABLE 3
Summary of SEC-HPLC (%) and Fab Tm by
DSF (° C.) for optimized antibodies

| | Fab Tm (DSF, | SEC-HPLC, % |
|---|---|---|
| Clone | ° C.) | monomer |
| ADI-71663 | 68.0 | 93.9 |
| ADI-71701 | 71.5 | 98.6 |
| ADI-71707 | 71.0 | 98.8 |
| ADI-71709 | 71.5 | 97.6 |
| ADI-71710 | 71.5 | 97.9 |
| ADI-71719 | 72.5 | 94.5 |
| ADI-71720 | 72.5 | 98.6 |
| ADI-71722 | 73.0 | 95.9 |
| ADI-71728 | 73.0 | 95.0 |
| ADI-71736 | 73.5 | 79.2 |
| ADI-71739 | 73.0 | 94.9 |
| ADI-71741 | 73.5 | 99.4 |
| ADI-71742 | 74.0 | 91.3 |
| ADI-71744 | 74.5 | 88.1 |
| ADI-71753 | 74.5 | 96.9 |
| ADI-71755 | 74.5 | 92.9 |

Anti IL18-BP hIgG1 Abs Analysis Included the Following Steps:

### Affinity Measurements of Anti-Human Abs to Human IL18-BP-Fc Protein and Cynomolgus Monkey IL18-BP-Fc Protein by ForteBio Octet—Naïve Output

[0691] Octet affinity measurements were performed on an Octet HTX generally as previously described (see, e.g., Estep et al, Mabs 5 (2, 270-278 (2013)). Briefly, ForteBio affinity measurements were performed by loading IgGs on-line onto AHC sensors. Sensors were equilibrated off-line in assay buffer for 30 min and then monitored on-line for 60 seconds for baseline establishment. Sensors with loaded IgGs were exposed to 100 nM antigen for 3 minutes, and afterwards were transferred to assay buffer for 3 min for off-rate measurement. All kinetics were analyzed using the 1:1 binding model.

### SPR Measurements

Surface Plasmon Resonance K_{D} measurements

[0692] Kinetic analysis was conducted at 25° C. in a HBS-EP+ running buffer system (10 mM HEPES pH 7.4, 150 mM NaCl, 3 mM EDTA, 0.05% Surfactant P20) using a Biacore 8K optical biosensor (Global Life Sciences Solutions USA, Marlborough, MA). The sample compartment was maintained at 10° C. for the duration of each experiment.

[0693] For antibody capture experiments, a goat anti-human Fc antibody (Jackson ImmunoResearch) was covalently coupled to flow cells 1 and 2 of a CM5 sensor chip surface via standard amine coupling (1:1 EDC:NHS) and then blocked with ethanolamine (1.0 M, pH 8.5). The antibodies (10.0 nM in running buffer) were injected (40 s at 10 μL/min) over flow cell 2. A series of concentrations of IL18-BP-Fc monomer ranging from 27.0 to 0.111 nM (3-fold dilutions in running buffer) were injected (300 s at 30 μL/min) over flow cells 1 and 2. Dissociation of IL18-BP-Fc monomer was monitored for 600 s or 5130 s. Several blank buffer samples were injected (300 s at 30 μL/min) over flow cells 1 and 2 and used for reference surface subtraction. All surfaces (flow cells 1 and 2) were regenerated via two injections (20 s at 30 μL/min) of 10 mM glycine, pH 1.5.

[0694] For biotinylated antigen capture-Fab or full Ab in solution experiments, each experiment cycle began with an injection (150 s at 2 μL/min) over flow cells 1 and 2 of a 1:20 solution of biotin CAPture reagent (Global Life Sciences Solutions USA) in running buffer. This was followed by an injection (120 s at 1.0 μL/min) of biotinylated IL18-BP-Fc fusion (10.0 nM) over flow cell 2. Upon capture of biotinylated IL18-BP-Fc fusion to the sensor surface, a series of Fab concentrations (24.3-0.1 nM, 3-fold dilution) of full Ab concentration (12.5 nM-0.8 nM, 2 fold dilution) was injected (300 s at 30 L/min) over flow cells 1 and 2. The dissociation of the Fabs or Abs were monitored for 600 s or 5130 s. Several blank buffer samples were injected (300 s at 30 μL/min) over flow cells 1 and 2 and used for reference surface subtraction. Finally, an injection (120 s at 10 μL/min) of regeneration solution (6 M Guanidine-HCl in 0.25 M NaOH) over flow cells 1 and 2 prepared the sensor surface for another cycle.

[0695] For data processing and fitting, the sensorgrams were cropped to include only the association and dissociation steps. This cropped data was subsequently aligned, double reference subtracted, and then non-linear least squares fit to a 1:1 binding model using Biacore Insight Evaluation software version 3.0.11.15423.

[0696] The results are shown in FIGS. 41 and 42.

[0697] FIG. 41A: Biacore image of the anti-IL18BP Fab-human IL18BP interactions; 10 min dissociation.

[0698] FIG. 41B: Biacore image of the anti-IL18BP Fab-human IL18BP interactions; 85 min dissociation.

[0699] FIG. 41C: Biacore image of the anti-IL18BP Fab-cyno IL18BP interactions, 10 min dissociation.

[0700] FIG. 41D: Biacore image of the anti-IL18BP Fab-cyno IL18BP interactions, 85 min dissociation.

[0701] FIG. 42 presents a Table, showing KD values for human/cyno anti-IL18BP Fab-IL18BP interactions measured by Biacore.

### MSD-SET K_{D} Measurements

[0702] Equilibrium affinity measurements performed as previously described (Estep et al., 2013). Solution equilibrium titrations (SET) were performed in PBS+0.1% IgG-Free BSA (PBSF) with antigen (biotinylated IL18-BP-Fc fusion) held constant at 50 pM and incubated with 1.5- to 3-fold serial dilutions of Fab starting at 10 nM to 500 pM (experimental condition is sample dependent). Antibodies (20 nM in PBS) were coated onto standard bind MSD-ECL plates overnight at 4° C. or at room temperature for 30 min. Plates were then blocked by BSA for 30 min with shaking at 700 rpm, followed by a wash with wash buffer (PBSF+0.05% Tween 20). SET samples were applied and incubated on the plates for 150 sec with shaking at 700 rpm followed by one wash. Antigen captured on a plate was detected with 1000 ng/ml sulfotag-labeled streptavidin in PBSF by incubation on the plate for 3 min. The plates were washed once with wash buffer and then read on the MSD Meso Sector S 600 instrument using 1× Read Buffer T with surfactant. The percent free antigen was plotted as a function of titrated antibody in Prism and fit to a quadratic equation to extract the K_{D}.

[0703] The results are shown in FIGS. 43-45.

[0704] FIG. 43A: Overlay of the Fab-IL18BP MSD Image (in Black) with the Human IL-18-IL18BP MSD Image (in Green).

[0705] FIG. 43B: Overlay of the Fab-IL18BP MSD Image (in Black) with the Cyno IL-18-IL18BP MSD Image (in Green).

[0706] FIG. 44 presents a Table, showing KD values for human/cyno anti-IL18BP Fab-IL18BP interactions measured by MSD.

[0707] FIG. 45 presents a Table, showing KD values for human/cyno IL18-IL18BP interactions measured by MSD.

### ForteBio Octet Epitope Binning

[0708] Epitope binning was performed using a standard sandwich format cross-blocking assay. Control anti-target IgG was loaded onto AHQ sensors and unoccupied Fc-binding sites on the sensor were blocked with an irrelevant human IgG1 antibody. The sensors were then exposed to 100 nM human IL18-BP-Fc antigen followed by a second anti-IL18-BP antibody. Additional binding by the second antibody after antigen association indicates an unoccupied epitope (non-competitor), while no binding indicates epitope blocking (competitor).

### AlphaLISA Competition Assay

[0709] Anti-HIS tag acceptor beads (Perkin Elmer AL178C) were incubated with 2.5 nM human or cyno IL18-BP His, along with 2.5 nM biotinylated human or cyno IL18 and 150 nM IgG for 60 mins. Following this incubation Steptavidin donor beads (Perkin Elmer 6760002S) were added and incubated for an additional 30 mins at room temperature. The samples are then read using a Perkin Elmer EnSpire Alpha Multimode Plate Reader (Perkin Elmer 2390). The samples are read at 615 nm after an excitation at 680 nm. Competition is calculated using Photon (PBSF only)/Photon (Antibody) ratio. For top binders, assay was repeated using antibody dose-titration (150 nM, 3-fold dilution).

### Affinity Measurements of Anti-Human IL18-BP Abs to Human IL18-BP Monomeric Protein and Cynomolgus Monkey IL18-BP-HIS Tag Protein by BiaCORE—Optimized Output

[0710] For biotinylated antigen capture-Fab in solution experiments, each experiment cycle began with an injection (150 s at 2 μL/min) over flow cells 1 and 2 of a 1:20 solution of biotin CAPture reagent (Global Life Sciences Solutions USA) in running buffer. This was followed by an injection (120 s at 1.0 μL/min) of biotinylated IL18-BP-Fc fusion (10.0 nM) over flow cell 2. Upon capture of biotinylated IL18-BP-Fc fusion to the sensor surface, a series of Fab concentrations (24.3-0.1 nM, 3-fold dilution) was injected (300 s at 30 μL/min) over flow cells 1 and 2. The dissociation of the Fabs were monitored for 600 s or 5130 s. Several blank buffer samples were injected (300 s at 30 μL/min) over flow cells 1 and 2 and used for reference surface subtraction. Finally, an injection (120 s at 10 μL/min) of regeneration solution (6 M Guanidine-HCl in 0.25 M NaOH) over flow cells 1 and 2 prepared the sensor surface for another cycle.

[0711] For data processing and fitting, the sensorgrams were cropped to include only the association and dissociation steps. This cropped data was subsequently aligned, double reference subtracted, and then non-linear least squares fit to a 1:1 binding model using Biacore Insight Evaluation software version 3.0.11.15423.

### Blocking of Human IL18:IL18-BP Interaction by ELISA

[0712] Anti-human IL18-BP Abs from Adimab were tested for inhibition of human IL18-BP-Fc fusion protein binding to IL-18 (R&D) by ELISA. Human anti-IL18-BP polyclonal antibody (R&D, cat. AF119) was coated on the wells of a high binding plate overnight at 4° C. (2.5 μg/ml, 50 μl/well volume). Coated plate was rinsed once with PBS and incubated with 250 μL blocking buffer (2.5% skim milk in PBS) for 2 hr in room temperature (RT). Serial dilutions of anti-human IL18-BP Abs (1:2, 4-0.06 μg/ml, 50 μL/well) mixed with 1 nM human IL18-BP-Fc and 4 nM biotinylated human IL18 at RT were pre-incubated for 1 h at RT. Blocking buffer was removed and plate was washed and, incubated with 100 μl/well protein mix for 2 h at RT. Plate was washed and incubated with streptavidin-HRP solution (Jackson; 50 μL/well volume) at RT for 1 h. Plate was washed 3 times with PBS-T, once with PBS, and incubated with TMB substrate solution (50 μL/well) at RT to allow signal development. The HRP reaction was stopped by addition of 1N HCl solution (50 μL/well), and absorbance signal was read at 450 nm on a luminescence Reader (EnSpire, Perkin Elmar). Data were exported to Excel (Microsoft) and plotted in GraphPad Prism (GraphPad Software, Inc.). Blocking was calculated as a decrease in the binding signal of biotinylated human IL-18 to IL18-BP-Fc protein in the presence of an Ab compared to the binding signal in the presence of an isotype control.

Rescue of Free Human IL18 from Pre-Complexed Human Serum and Recombinant Human IL18 by ELISA

[0713] Anti-human IL18-BP Abs from Adimab were tested for rescue of human recombinant IL18 pre-bound by human IL18-BP in human serum by ELISA. Human anti-IL18 Mab (MOR09464_N30K antibody Novartis patent US 2014/0112915 A1) was coated on the wells of a high binding plate overnight at 4° C. (2.5 μg/ml, 50 μl/well volume). Coated plate was rinsed once with PBS and incubated with 250 μL blocking buffer (2.5% skim milk in PBS) for 2 hr in room temperature (RT). Serial dilutions of anti-human IL18-BP Abs (1:2, 5-0.078 μg/ml, 50 μL/well) were mixed and incubated for 2 h at 37° C. with human healthy donor serum (ISERS50 Almog) spiked with 4 ng/ml of recombinant human IL18 (R&D) for 1 h at RT. For standard curve, serial dilutions of recombinant IL18 in blocking buffer were made (1:2, 3-0.05 ng/ml). Blocking buffer was removed and plate was washed and, incubated with 100 μl/well protein mix for 2 h at RT. Plate was washed and incubated with D045-6-biotin (1:1000 in 1% BSA PBS, 100 μl/well, R&D) at RT for 1 h. Plate was washed and incubated streptavidin-HRP solution (Jackson; 50 μL/well volume) at RT for 1 h. Plate was washed 3 times with PBS-T, once with PBS, and incubated with TMB substrate solution (50 μL/well) at RT to allow signal development. The HRP reaction was stopped by addition of 1N HCl solution (50 μL/well), and absorbance signal was read at 450 nm on a luminescence Reader (EnSpire, Perkin Elmar). Data were exported to Excel (Microsoft) and plotted in GraphPad Prism (GraphPad Software, Inc.). % IL18 rescue was calculated as an addition of free IL18 detected over total IL18:IL18-BP complex amount in the presence of an Ab compared to the binding signal in the presence of an isotype control.

Rescue of Free Cyno Recombinant IL18 from Pre-Complexed Cyno Recombinant IL18-BP with Recombinant Cyno IL18 by ELISA

[0714] Anti-human IL18-BP Abs from Adimab were tested for rescue of cyno recombinant IL18 pre-bound by cyno recombinant IL18-BP by ELISA. Human anti-IL18 Mab (MOR09464_N30K antibody Novartis patent US 2014/0112915 A1) was coated on the wells of a high binding plate overnight at 4° C. (2.5 μg/ml, 50 μl/well volume). Coated plate was rinsed once with PBS and incubated with 250 μL blocking buffer (2.5% skim milk in PBS) for 2 hr in room temperature (RT). Blocking buffer was removed and plate was washed and, incubated for 1 h at 37° C. with 100 μl/well of serial dilutions of anti-human IL18-BP Abs (1:3, 10-0.004 μg/ml, 50 μL/well) mixed with pre-formed cyno IL18:IL18-BP complex (1 ng/ml rhesus IL18, R&D and 25 ng/ml IL18BP-His, R&D; incubated 1 h at 37° C.). Plate was washed and incubated with D045-6-biotin (1:2000 in 1% BSA PBS, 100 μl/well, R&D) at RT for 1 h. Plate was washed and incubated streptavidin-HRP solution (Jackson; 50 L/well volume) at RT for 1 h. Plate was washed 3 times with PBS-T, once with PBS, and incubated with TMB substrate solution (50 μL/well) at RT to allow signal development. The HRP reaction was stopped by addition of 1N HCl solution (50 μL/well), and absorbance signal was read at 450 nm on a luminescence Reader (EnSpire, Perkin Elmar). Data were exported to Excel (Microsoft) and plotted in GraphPad Prism (GraphPad Software, Inc.). % IL18 rescue was calculated as an addition of free IL18 detected over total IL18:IL18-BP complex amount in the presence of an Ab compared to the binding signal in the presence of an isotype control.

Rescue of Free Human IL18 from Pre-Complexed Human IL18-IL18-BP by IL18 HEK293 Reporter Cells

[0715] 0.1 ng/ml human IL18 (R&D) was pre-incubated with cell medium express high levels of IL18-BP from SUIT2 INF-gamma treated cell (24 h, 1000 U/ml) in the presence of 3 μg/ml of Adimab Abs or isotype control. 50K/well of HEK293 reporter cells (Invivogen) were seeded in 96 well plate in Test medium (DMEM high glucose, 10% FBS, 1% pen-strep, 1% glutamax) and 20 μl of sample was added to each well. Cells were incubated for 20 h at 37° C. CO₂ incubator. Next day, 20 μl induced cells supernatant were added to 180 μl prewarmed Quanti-Blue solution (Invivogen) in 96 well plate. Cells were incubated at 37° C. for 1 hour and SEAP levels were measured by OD650 reading. All samples were measured in duplicates. Blocking was calculated as an increase of the free IL18 detection in the presence of an Ab compared to the free IL18 levels in the presence of an isotype control.

### Results:

Anti-Human IL18-BP hIgG1 Generation

[0716] The yeast naïve libraries at Adimab were used in 5 rounds of selection using human IL18-BP fused to hIgG1 Fc protein or cynomolgus monkey IL18-BP-Fc protein (Adimab) and one round of counter selection against poly-specificity reagent for depletion of non-specific antibodies. Human IL18 was added on top of human IL18-BP antigen is several rounds to enrich for blocking antibodies.

[0717] In the first screen, 740 clones were isolated, sequenced and screened for binding to human IL18-BP in Kd ranking using Bio-Layer Interferometry (BLI) technology on a label-free, dip-and-read biosensor platform (ForteBio Octet® RED384) Octet instrument. Out of 740 clones, 341 were unique and identified as positive binders to human IL18-BP, 266 antibodies had the affinity below 100 nM to human monomeric IL18BP. A secondary screen of top 341 Octet-positive antibodies included affinity measurements to cynomolgus monkey IL18-BP fused to hIgG1 Fc or to cynomolgus monkey IL18-BP-HIS and to human IL18-BP monomeric protein. 195 antibodies were human/cyno cross-reactive. Initial antibody binning was performed using sandwich approach in Octet instrument; however, the assay could not discriminate between likely IL18-competitors and non-competitors. To overcome this, binning of the antibodies was performed using ligand competition in FACS. Individual clones were tested in the presence of 10 nM Hu IL18BP Fc with or without 100 nM IL18. All clones picked show competition with the IL18 for the binding to IL18BP (Antibodies represent only bin 1 and all are ligand competitive).

[0718] Next, variable heavy region from 341 unique clones from the naïve selection were subcloned into pre-made light chain shuffled library. Selection of LCBS libraries were performed as described above, with 3 rounds of selection using either human or cynomolgus monkey IL18-BP antigen and one round of counter selection using PSR.

[0719] In the first screen, 1152 clones were isolated, sequenced and screened for binding to human IL18-BP in KD ranking using Bio-Layer Interferometry (BLI) technology on a label-free, dip-and-read biosensor platform (ForteBio Octet® RED384) Octet instrument. Out of 1152 clones, 658 were unique and identified as positive binders to human IL18-BP. Antibodies were ranked based on binding affinity to human IL18-BP-Fc protein and top 87 clones were picked for further characterization and purified from the medium of the yeast expressing cells using affinity column. A secondary screen of top 87 Octet-positive antibodies included affinity measurements to cynomolgus monkey IL18-BP fused to hIgG1 Fc or to cynomolgus monkey IL18-BP-HIS and to human IL18-BP monomeric protein. Antibodies were binned according to IL18-BP-Fc binding and competition with human IL18. Competition for the binding of IL18-BP-Fc was performed in AlfaLISA assay with 150 nM of purified hIgG1. Based on all above, antibodies were ranked, and top 16 antibodies were screened in AlfaLISA using dose-titration of the antibodies (150 nM, 3-fold dilution). Top 6 blocking human/cyno IL18-BP binders were selected for optimization.

[0720] Relevant CDR's from top 6 parental clones were shuffled into pre-made CDRH1 and CDRH2 libraries and 3 rounds of selections were performed at Adimab using human IL18-BP monomeric protein or cynomolgus monkey IL18-BP-HIS protein. 79 unique clones were identified and screened for the binding to monomeric human and cyno IL18-BP proteins in Octet.

[0721] Relevant CDR's from 79 unique clones were used to create CDRH3 and CDRL3 diversification libraries. CDRH3/L3 libraries were panned using precomplex of 10 nM of IL18-BP monomer with 100 nM of parental IgG to pressure for Koff enriched clones. 47 unique clones were identified and purified from the medium of the yeast expressing cells using affinity column. Analysis of top 47 antibodies included affinity measurements (Octet and Biacore) to cynomolgus monkey and to human IL18-BP monomeric protein. All 47 clones reached Koff limit of detection by Octet for 85-minute dissociation. Affinity of 47 clones to human and cynomolgus monkey IL18-BP was measured by Biacore, 24 out of 47 clones reached Koff limit of detection for 85 minute dissociation as measured by Biacore for human IL18-BP and 5 reached Koff limit of detection for 85 minute dissociation as measured by Biacore for cyno IL18-BP (FIG. 8). Competition with human IL18 for the binding of IL18-BP-Fc was performed in AlfaLISA assay with 15 nM of purified hIgG1 (FIG. 9).

### Blocking of Human and Cyno IL18-IL18-BP Interaction by ELISA

[0722] The blocking activity of the parental mAbs against human IL18-BP was analyzed by ELISA. As shown in FIG. 10, anti-human IL18-BP Abs (1:2, 4-0.06 μg/ml), showed dose-dependent blocking effect as compared to isotype control. Anti-human IL18-BP Abs (1:3, 10-0.01 μg/ml), showed dose-dependent blocking effect for cyno IL18:IL18-BP interaction as compared to isotype control (FIG. 11). IC50 values for the anti-human IL18-BP Abs are shown in FIG. 12.

Rescue of Free Human/Cyno IL18 from Pre-Complexed Human or Cyno IL18-IL18BP by Anti-IL-18BP Abs

[0723] The ability of anti-human IL-18BP affinity matured mAbs_to release human IL18 bound by human IL18BP and cyno IL18 bound by cyno IL18BP protein was demonstrated using ELISA assay.

[0724] As shown in FIG. 31, anti-human IL18BP mAbs were able to release human IL18 from a pre-formed human IL-18:IL-18BP complex compared to isotype control.

[0725] As shown in FIG. 32, dose titration (10 μg/ml, serial dilution 1:3) of anti-human IL18BP mAbs released cyno IL18 from a pre-formed cyno IL-18:IL-18BP complex compared to isotype control.

Rescue of Free Human IL18 from Pre-Complexed Human IL18-IL18-BP by IL18 HEK293 Reporter Cells

[0726] The ability of the mAbs against human IL18-BP to rescue human IL18 bound by IL18-BP protein was demonstrated using IL18 HEK293 reporter cells. Addition of 30 ng/ml anti-human IL18-BP Abs was able to restore free IL18 for all tested Abs (FIG. 13).

[0727] Consensus sequence was generated using optimized sequences from each parental library using SnapGene MUSCLE alignment. High affinity IL18BP binders from each parental lineage were aligned to respective germline sequences. Consensus was generated with >90% threshold.

[0728] The 66650 lineage (VH1-03; VL-kappa-1-5) consensus sequence of CDRs (FIG. 1A) was generated using ADI-71701, ADI-71709, ADI-71710, ADI-71707 and ADI-71717 antibodies. The respective sequence alignment is shown in FIG. 3B.

[0729] The 66650 lineage (VH1-03; VL-kappa-1-5) consensus sequence comprises:
[0730] CDR-H1 having the sequence Y-T-F-X-X2-Y-A-X3-H, wherein X is N, R, D, G or K; X2 is S, H, I or Q; X3 is M or V;
[0731] CDR-H2 having the sequence W-I-H-A-G-T-G-X-T-X2-Y-S-Q-K-F-Q-G, wherein X is N, A or V; X2 is K or L;
[0732] CDR-H3 having the sequence A-R-G-L-G-X-V-G-P-T-G-T-S-W-F-D-P, wherein X is S or E;
[0733] CDR-L1 having the sequence R-A-S-Q-G-I-S-S-W-L-A;
[0734] CDR-L2 having the sequence E-A-S-S-L-E-S; and
[0735] CDR-L3 having the sequence Q-Q-Y-R-X-X2-P-F-T, wherein X is S, V, Y, L or Q; X2 is F, S, or G.

[0736] The 66670 lineage (VH1-69; VL-kappa-1-12) consensus sequence of CDRs (FIG. 1B) was generated using ADI-71719, ADI-71720, ADI-71722 and ADI-71728 antibodies. The respective sequence alignment is shown in FIG. 3C.

[0737] The 66670 lineage (VH1-69; VL-kappa-1-12) consensus sequence comprises
[0738] CDR-H1 having the sequence G-T-F-X-X2-Y-X3-I-S, wherein X is S or N; X2 is E or S; X3 is V or P;
[0739] CDR-H2 having the sequence G-I-I-P-G-X2-G-T-A-X3-Y-A-Q-K-F-Q-G, wherein X is G or Y, X2 is A or S; X3 is N, I or V
[0740] CDR-H3 having the sequence A-R-G-R-H-X-H-E-T, wherein X is S, G, or F;
[0741] CDR-L1 having the sequence R-A-S-Q-G-I-S-S-W-L-A;
[0742] CDR-L2 having the sequence A-A-S-S-L-Q-S; and
[0743] CDR-L3 having the sequence Q-Q-V-Y-X-X2-P-W-T, wherein X is S or R; X2 is L, I, or F.

[0744] The 66692 lineage (VH3-23, VL-kappa-1-12) consensus sequence of CDRs (FIG. 1C) was generated using ADI-71662, ADI-71663 and ADI-66692 antibodies. The respective sequence alignment is shown in FIG. 3A.

[0745] The 66692 lineage (VH3-23, VL-kappa-1-12) consensus sequence comprises:
[0746] CDR-H1 having the sequence F-T-F-X-N-X2-A-M-S, wherein X is G or D or S; X2 is T or V or Y;
[0747] CDR-H2 having the sequence A-I-S-X-X1-X2-G-S-T-Y-Y-A-D-S-V-K-G, wherein X is G or A; X2 is N or S; X3 is A or G;
[0748] CDR-H3 having the sequence A-K-G-P-D-R-Q-V-F-D-Y;
[0749] CDR-L1 having the sequence R-A-S-Q-G-I-X-S-W-L-A, wherein X is S or D;
[0750] CDR-L2 having the sequence A-A-S-S-L-Q-S; and
[0751] CDR-L3 having the sequence Q-H-A-X-X1-F-P-Y-T, wherein X is Y or L; X2 is S or F.

[0752] The 66716 lineage (VH1-39; VL-kappa-1-12) consensus sequence of CDRs (FIG. 1D) was generated using ADI-71736, ADI-71739 and ADI-66716 antibodies. The respective sequence alignment is shown in FIG. 3D.

[0753] The 66716 lineage (VH1-39; VL-kappa-1-12) consensus sequence comprises:
[0754] CDR-H1 having the sequence G-S-I-S-S-X-X2-Y-X3-W-G, wherein X is S or P; X2 is E or D; X3 is G, P or Y;
[0755] CDR-H2 having the sequence S-I-X-X2-X3-G-X4-T-Y-Y-N-P-S-L-K-S, wherein X is Y or V; X2 is Y or N; X3 is Q or S; X4 is S or A;
[0756] CDR-H3 having the sequence A-R-G-P-X-R-Q-X2-F-D-Y, wherein X is Y or H, X2 is V or L;
[0757] CDR-L1 having the sequence R-A-S-Q-G-I-S-S-W-L-A;
[0758] CDR-L2 having the sequence A-A-S-S-L-Q-S; and
[0759] CDR-L3 having the sequence Q-Q-G-X-X2-F-P-Y-T, wherein X is S or F; X2 is S or V.

### Example 11: Affinity of Anti IL-18BP Ab to IL18BP Compared to IL-18BP:IL-18 by Kinexa and Biacore

[0760] Affinity of ADI-71739:IL-18BP vs IL-18:IL-18BP in human, cyno and clone W19089C (Biolegend): IL-18BP (KinExA) and mouse (Biacore) and characterization information.

[0761] The Kinetic Exclusion Assay (KinExA®) measures the equilibrium binding affinity and kinetics between unmodified molecules in solution. For affinity analysis, the equilibrium dissociation constant, Kd, is experimentally determined and reflects the strength of the binding interaction. The rate of association, Kon, is also experimentally determined, while the rate of dissociation, koff, is usually calculated based on the following equation: koff=Kd×kon.

[0762] A Kd analysis requires immobilization of one interaction partner to a solid phase which is then used as a probe to capture the other interaction partner, the constant binding partner (CBP). For each experiment, one of the binding partners is titrated in a background of the CBP and allowed to reach equilibrium. The solutions are then briefly exposed to the solid phase and a portion of free CBP is captured. The captured CBP is then labeled with a fluorescent secondary molecule. The short contact time with the solid phase is less than the time needed for dissociation of the pre-formed complex in solution, thus competition between the solution and the solid phase titrated binding partner is “kinetically excluded.” Since the solid phase is only used as a probe for the free CBP in each sample, the solution equilibrium is not altered during KinExA measurements. The signals generated from the captured CBP, which are directly proportional to the concentration of free CBP in the equilibrated samples, are used to determine the Kd value. The KinExA Pro software performs a least squares analysis on the measured data to fit optimal solutions for the Kd and the activity of the CBP to a curve representative of a 1:1 reversible bi-molecular interaction. For each data point along the curve, the x-axis reflects the molar concentration of the titrated binding partner, and the y-axis reflects the percentage of free CBP at that particular titrant concentration at equilibrium.

### Spr Affinity Measurements of Anti-IL18BP Binding to Mouse IL18BP

[0763] Fab preparation: Fab fragments were prepared from 1 mg of anti-IL18BP hIgG1 N97A yeast produced antibodies using Fab digestion kit (Pierce, cat. 44985). SDS PAGE gel analysis of purified Fab fragments was performed in reduced and non-reduced conditions

[0764] All experiments were performed in Biacore T100 optical biosensor (Global Life Sciences Solutions USA, Marlborough, MA)

### Capture Chip Preparation

[0765] A human Fc capture reagent (Cytyva, BR1008-39) was covalently coupled to flow cells 3 and 4 of a CM5 sensor chip surface via standard amine coupling at 10 μg/mL in pH 5 acetate buffer, followed by a six-minute blocking step with ethanolamine (1.0 M, pH 8.5).

### Mouse IL18BP Binding Kinetics to Anti-IL18BP Fab

[0766] For antigen capture in solution experiments, each experiment cycle began with an injection (60 s at 5 μL/min) over flow cells 3 and 4 of a 10 μg/ml solution of mouse IL18BP-Fc or hIgG1 isotype control, respectively. Upon capture of mouse IL18-BP-Fc fusion or isotype control to the sensor surface, a series of Fab concentrations (300-2.21 nM, 2-fold dilution) was injected (60 s at 30 μL/min) over flow cells 3 and 4. The dissociation of the Fabs were monitored for 900 s. Several blank buffer samples were injected (60 s at 30 μL/min) over flow cells 3 and 4 and used for reference surface subtraction. Finally, an injection (60 s at 10 μL/min) of regeneration solution (10 mM Glycine pH=1.5) over flow cells 3 and 4 prepared the sensor surface for another cycle.

[0767] As seen in FIG. 52, ADI-71739 binds human and cyno IL-18BP (Kd˜291fM, Kd˜208fM respectively) at higher affinity than human and cyno IL-18 (Kd˜441fM, Kd˜345fM respectively). ADI-71739 binds mouse IL-18BP (Kd˜4 nM) at lower affinity than IL-18 (Kd˜3.7 pM).

### Example 12:IL-18BP-Biochemical Comparison Between Commercial Abs and Adimab Anti IL-18BP Ab

### Methods:

Blocking of hIL18BP-hIL-18 Interaction Using a-hIL18BP Abs by ELISA-IL18BP Plate Bound

[0768] This assay was utilized to identify anti-human IL18BP Abs that inhibit the binding interaction between human IL18BP− and its counterpart, human IL-18. Commercial Ab anti human IL18BP (clone W19089C, cat. 947703, Biolegend), ADI-71739 and ADI-71722 were tested for inhibition of human IL18BP protein binding to IL-18 by ELISA. Human IL18BP− Fc protein was coated on the wells of a high binding plate overnight at 4° C. (1 μg/ml, 100 μl/well volume). Plates were washed three times with PBS-T buffer (1×PBS pH 7.4, 0.05% Tween20) incubated with 250 μL blocking buffer (2.5% skim milk in PBS) at room temperature (RT) for 2 hr. Blocking buffer was removed and plates were washed three times with PBS-T buffer. Plate-bound ligands were incubated with anti-human IL18BP Abs in 1% BSA in PBS buffer two times serially diluted (2.5-0.019 μg/ml, 100 μL/well volume) at RT for 1 h. Plates were washed one time with PBS. Plate-bound ligands were incubated with human IL-18 (cat. 9124-IL, R&D) in in 1% BSA in PBS buffer (1 ng/ml, 100 μL/well volume) at RT for 1 h. Plates were washed three times with PBS-T (0.05% Tween20 in PBS). Biotinylated anti-IL18 detection antibody, cat. D045-6, R&D 1:1000 in 1% BSA in PBS buffer was added (100 μL/well). This was incubated at RT for 1 hr, and plates were washed again. Peroxidase Streptavidin, Jackson, cat. 016-030-084 1:1000 in 2.5% skim milk in PBS was added (100 μL/well) for 1 hr at RT. Plates were washed three times with PBS-T buffer (1×PBS pH 7.4, 0.05% Tween20). ELISA signals were developed in all wells by adding 50 μL of TMB substrate and incubating for signal development, 1.45 min. The HRP reaction was stopped by adding 50 μL 1N HCl and absorbance signals at 450 nm were read on a luminescence Reader-EnSpire (Perkin Elmar). The data were exported to Excel (Microsoft) and plotted in GraphPad Prism (GraphPad Software, Inc.).

### Competition ELISA Using Complex of Soluble IL18-IL18BP and Anti IL18BP Abs

[0769] This assay was utilized to identify anti-human IL18BP Abs that inhibit the binding interaction between human IL18BP− and its counterpart, human IL-18. Commercial Ab anti human IL18BP (Clone 136007, cat. MAB1191, R&D systems) and ADI-66716 were tested for inhibition of human IL18BP protein binding to IL-18 by ELISA. Human IL18BP antibody (cat. AF119, R&D) was coated on the wells of a high binding plate overnight at 4° C. (1 ug/ml, 100 μl/well volume). Plates were washed three times with PBS-T buffer (1×PBS pH 7.4, 0.05% Tween20) incubated with 250 μL blocking buffer (2.5% skim milk in PBS) at room temperature (RT) for 2 hr. Blocking buffer was removed and plates were washed three times with PBS-T buffer. Complex pre-formed 1 hour at 37c with 0.25 nM human IL-18-BP (R&D, cat. 119BP) and 3 nM Human IL-18 Biotin (9124-IL, R&D) in 1% BSA in PBS buffer. Complex was incubated for 2 hr at RT together with anti-human IL18BP Abs (in 1% BSA in PBS buffer two times serially diluted. 4-0.06 μg/ml, 100 μL/well volume). Peroxidase Streptavidin, Jackson, cat. 016-030-084 1:1000 in 2.5% skim milk in PBS was added (100 μL/well) for 1 hr at RT. Plates were washed three times with PBS-T buffer (1×PBS pH 7.4, 0.05% Tween20). ELISA signals were developed in all wells by adding 50 μL of TMB substrate and incubating for signal development. The HRP reaction was stopped by adding 50 μL 1N HCl and absorbance signals at 450 nm were read on a luminescence Reader-EnSpire (Perkin Elmar). The data were exported to Excel (Microsoft) and plotted in GraphPad Prism (GraphPad Software, Inc.).

### Results:

[0770] Blocking activity of AB-71739 and AB-71722 was compared to anti-IL18BP Ab commercial antibody (clone W19089C, Biolegand). As seen in FIG. 53, the blocking effect of AB-71739 and AB-71722 was superior to Biolegend Ab.

[0771] Affinity of Biolegend antibody (cat. 947703, clone W19089C) to human IL18BP was measured by KinExA and was found to be 63.8 pM (See method in Example 11).

[0772] Blocking activity of ADI-66716 was compared to anti-IL18BP Ab commercial antibody (Clone 136007, cat. MAB1191, R&D systems) in soluble blocking ELISA assay. FIG. 54 showed that ADI-66716 (right hand bars) had superior blocking effect to R&D antibody.

[0773] Affinity of R&D antibody (cat. MAB1191) to human IL18BP was measured by Biacore and was found to be 2.73*10\hat{ }−10M (FIG. 76).

### Example 13: Functional Assessment of Anti-IL18-BP Abs from Adimab Campaign

### Methods:

[0774] NK-Based Assay for Functional Assessment of Anti-IL18-BP Antibodies

[0775] Human NK cells were thawed in RPMI 1640 with 20% FBS and washed once more with full RPMI (RPMI 1640, 10% FBS, 1% Glutamax, 1% Penicillin-Streptomycin Solution). The cells were then seeded at 50 k cells/well in a 96 well plate and incubated 30 minutes in 37° C., 5% CO₂ incubator with a combination of rhIL-12 (10 ng/ml, R&D systems, 10018-1L/CF), rhIL-18 (3 ng or 10 ng/ml, R&D systems, 9124-IL/CF) and rhIL-18BP-Fc chimeric protein (1 ug/ml, R&D systems 119-BP) to allow IL-18+IL-18BP complex formation. After 30 minutes, decreasing concentrations of anti-human IL-18BP mAbs or relevant isotype control were added to the culture to examine their capability to restore IL-18 activity. Cells and all added solutions were prepared in full RPMI media to a final volume of 150 μl/well. Plates were incubated for 24 hours in 37° C., 5% CO₂ incubator, after which the supernatant was collected for IFNγ secretion evaluation. On some occasions cell pellets were harvested and stained for membrane CD69 levels as a measurement of NK cell activation. All tests were done in triplicates and each repeated with four donors.

### PBMC-Based Assay for Blocking Endogenously Secreted IL-18BP

[0776] Human PBMCs were thawed in RPMI 1640 with 20% FBS, washed once more with full RPMI (RPMI 1640, 10% FBS, 1% Glutamax, 1% Penicillin-Streptomycin Solution) and incubated in a T-75 flask for 24 hours in 37° C., 5% CO₂ incubator to allow recovery. The cells were then seeded at 200 k cells/well in a 96 well plate and cultured with a combination of rhIL-12 (10 ng/ml, R&D systems, 10018-1L/CF), rhIL-18 (33.3 ng/ml or 2 ng/ml, R&D systems, 9124-IL/CF) and decreasing concentrations of anti-human IL-18BP mAbs or isotype control. Cells and all added solutions were prepared in full RPMI media to a final volume of 150 μl/well. Plates were incubated for 24 hours in 37° C., 5% CO₂ incubator, after which supernatant was collected for IFNγ secretion evaluation. IL-18BP secretion was confirmed by IL-18/IL-18BP complex ELISA (R&D Systems, DY8936-05, not shown). All tests were done in triplicates and each repeated with two donors for ADI66716 and ADI66692, and five donors for affinity matured antibodies.

### CD69 Expression

[0777] After 24 hours of incubation, NK cell pellets were collected, washed from residual medium with PBS and labeled with a viability dye (Zombie NIR) diluted 1:1000 in PBS for 15 min at RT, in the dark. The cells were then incubated with Fc receptor blocking solution (Trustain Fcx, Biolegend, 2.5 μl/reaction) for 10 min at room temperature. To detect cell surface expression of CD69, the cells were incubated with PE-anti-human CD69 Ab (BioLegend, 1 μg/ml) for 30 min on ice, in the dark. The cells were then washed once and analyzed using MACSquant analyzer.

### Cytokine Secretion

[0778] To measure IFNγ secretion from the cells, supernatants were collected 24 hours post stimulation and tested by CBA human IFNγ kit (BD Biosciences, 558269) for NK cells or CBA Human Th1, Th2, Th17 cytokine kit (BD Biosciences, 560484) for PBMCs.

### Data Analysis and Statistics

[0779] All FACS files were analyzed by FlowJo software. Where applicable, EC50s were calculated using GraphPad Prism software.

### Results:

Analysis of mAbs Performance in Blocking of mIL 18-BP-mIL-18 Interaction in an In-Vitro NK Based Assay

[0780] The functional blocking activity of mAbs against recombinant human IL18-BP was evaluated by an NK-based assay. As shown in FIG. 14, anti-human IL18-BP Abs were able to block recombinant IL-18BP and fully restored IL-18 activity, depicted by IFNγ secretion and CD69 expression in a dose dependent manner as compared with the isotype control. EC50 value were in the single and double-digit nM range.

Analysis of mAbs Performance in Blocking of mIL18-BP-mIL-18 Interaction in an In-Vitro PBMC Based Assay

[0781] The functional blocking activity of mAbs against endogenous human IL18-BP was evaluated by an PBMC-based assay. As shown in FIG. 15, anti-human IL18-BP Abs were able to block endogenous IL-18BP and to restore IFNγ secretion in a dose dependent manner as compared with the isotype control.

### Example 14: Functional Assessment of Anti IL-18BP Abs in T Cell Based Assay and in Combination with ICB

[0782] A soluble immune checkpoint up-regulated in the TME in response to IFNγ. αIL-18BP restores T and NK activity. This provides a proposed mechanism for anti-PD-1 resistance in IFNγ-high patients.

[0783] Activity: In vitro-αIL-18BP restores T and NK cells activity. In vivo activity with αIL-18BP Ab demonstrates tumor growth inhibition both as a monotherapy and in combination with ICB.

### MEL624: TIL Assay for Functional Assessment of Anti-IL18-BP Antibodies

### Methods:

[0784] Human MEL624 cells were thawed and grown in DMEM with 10% FBS, 1% Glutamax, 1% Penicillin-Streptomycin Solution and 1% HEPES buffer. The cells were then seeded at 75 k cells/well in a 96 well plate in the assay medium (IMDM with 10% human serum, 1% Glutamax, 1% MEM eagle, 1% Sodium Pyruvate and 1% Penicillin-Streptomycin Solution) and incubated 1 hour in 37° C., 5% CO₂ incubator before co-culture with human tumor infiltrating lymphocytes that were previously expanded using known melanoma antigens (TILs). Human TILs were thawed in full TIL media and 75 k cells/well were co-cultured with the MEL624 cells to create an effector:target ratio of 1:1. The co-cultured cells were then treated with rhIL-18 (30 ng/ml) and rhIL-18BP (1 μg/ml) for 30 min in 37° C., 5% CO₂ incubator to allow IL-18:IL-18BP complex formation. After 30 minutes, anti-human IL-18BP mAb (ADI-71722, dose titration, 30 μg/ml-0.01 μg/ml, dilution factor of 1:3) or relevant isotype control (hIgG1 30 μg/ml) were added to the co-culture to examine its capability to restore IL-18 activity. Cells and all added solutions were prepared in full assay medium to a final volume of 200 μl/well. Plates were incubated for 24 hours in 37° C., 5% CO₂ incubator, after which the supernatant was collected for cytokine secretion evaluation. All tests were done in triplicates and each repeated with TIL four donors.

### Cytokine Secretion

[0785] To measure cytokine secretion from the cells, supernatants were collected 24 hours post stimulation and tested by CBA Human Th1, Th2, Th17 cytokine kit (BD Biosciences, 560484).

[0786] Where applicable, the EC50 value was calculated using GraphPad Prism software.

### Results:

[0787] The functional blocking activity of mAbs against recombinant human IL18-BP was evaluated by a MEL624: TIL assay. As shown in FIGS. 49A-B and 50, the anti-human IL18-BP Ab (ADI-71722, was able to block recombinant IL-18BP and to fully restore IL-18 activity, depicted by IFNγ secretion, in a dose dependent manner as compared with the isotype control.

CMV Recall Assay for Functional Assessment of Anti-IL18-BP Abs as Mono and in Combination with Anti-PVRIG/Anti-TIGIT/Pembrolizumab

### Methods:

[0788] Human MEL-624 overexpressing PD-L1 cells were thawed and loaded with CMV pp65 peptide (0.03 μg/ml). The cells were seeded at 100K/well in a 96 well plate and incubated for 30 minutes in 37° C., 5% CO₂ incubator with a combination rhIL-18 (30 ng/ml, R&D systems, 9124-IL/CF) and rhIL-18BP-Fc chimeric protein (2 g/ml, R&D systems 119-BP) to allow IL-18+IL-18BP complex formation. After 30 minutes, anti-human IL-18BP (ADI-71722, anti-human PVRIG, anti-human TIGIT (anti-TIGIT), anti-human PD1 (Pembrolizumab) or relevant isotype control (hIgG4) were added to the culture to examine their capability to restore IL-18 activity. All antibodies were added to a final concentration of 10 μg/ml. 30 minutes post incubation with antibodies, thawed CMV-reactive T-cells were added to the culture. Cells and all added solutions were prepared in full IMDM (IMDM media with 10% human serum, 1% Glutamax, 1% MEM eagle, 1% sodium pyruvate, and 1% Penicillin-Streptomycin Solution) to a final volume of 200 μl/well. Plates were incubated for 24 hours in 37° C., 5% CO₂ incubator, after which the supernatant was collected for IFNγ secretion evaluation. All tests were done in triplicates and each repeated with three donors.

### Results:

[0789] The functional blocking activity of mAbs against recombinant human IL18-BP was evaluated by CMV recall assay. As shown in FIGS. 49C-D and 51, the anti-human IL18-BP Ab was able to block recombinant IL-18BP and to fully restore IL-18 activity, as depicted by IFNγ secretion. Combination of the anti-IL-18BP Ab with anti-PVRIG/anti-TIGIT/Pembrolizumab resulted in greater IFNγ secretion indicating a beneficial effect on T-cell activation.

### Example 15: Functional Assessment of Anti IL-18BP Abs in T Cell Based Assay and in Combination with ICB

### Whole Blood Assay

[0790] As shown in FIG. 66, anti-IL-18BP antibody Ab-71709, as mono or in combination with Nivolumab, did not show signs of systemic immune activation in ID. Flow, an ex vivo system that mimics the human blood circulation. Fresh whole blood was taken from six healthy volunteers and immediately transferred to a whole blood loop system. The test items were administered, and the blood was set to circulate at 37° C. to prevent clotting. Blood samples collected at the 24 hr time point were analyzed for hematology and flow cytometry parameters and then processed to plasma for cytokine analysis. The anti-CD52 antibody Alemtuzumab was included as a reference antibody with manageable cytokine release in the clinic. As opposed to Alemtuzumab, according to the various readouts employed, the anti-IL-18BP antibody did not induce any signs of systemic immune activation, as mono or in combination with the anti-PD1 antibody Nivolumab.

### In Vitro Studies Testing the Effects of ADI-71739 on Killing of Melanoma Cells by Human TILs

[0791] As shown in FIG. 67, Anti-IL18-BP antibody ADI-71739 increased killing of melanoma cells by tumor infiltrating lymphocytes. Schematic representation of assay setup is shown in FIG. 67A. MEL624 cells were co-cultured with human TILs that were previously enriched for MARTI or gp100 peptide-specific clones. rhIL-18 (R&D systems, 50 ng/ml) and rhIL-18BP (R&D systems, 1 μg/ml) were added to the co-culture for 30 minutes to allow the formation of IL-18:IL-18BP complex prior to treatment with 10 μg/ml ADI-71739 or isotype control. The co-culture was monitored for 72 hours using an IncuCyte live cell imaging instrument. As shown in FIG. 67B, addition of IL-18 (grey) enhanced tumor cell killing as indicated by lower confluence (left) and increased apoptosis (right) over time of the MEL624 cells. In the presence of the isotype control antibody (black), IL-18BP abrogated the effects of IL-18, while the anti-IL-18BP antibody (turquoise) was able to completely restore these effects.

In Vitro Studies Testing the Effects of Combination of ADI-71739 Ab with Other Checkpoint Blocking Antibodies

[0792] As shown in FIG. 68, ADI-71739 increased IFNg secretion by CMV-specific T cells as mono and in combination with aPVRIG/aTIGIT/Pembrolizumab. Schematic representation of assay setup is shown in FIG. 68A. MEL624 cells that overexpress PD-L1 were loaded with CMV peptide pp65. The cells were cultured for 30 minutes with rhIL-18 (R&D systems, 30 ng/ml) and rhIL-18BP (R&D systems, 2 g/ml) to allow the formation of IL-18:IL-18BP complex, and the cells were then treated with 10 μg/ml ADI-71739 or aPVRIG (anti-PVRIG) or aTIGIT (anti-TIGIT) or Pembrolizumab (anti-PD-L1) or isotype control, as mono or in various combinations. CMV-specific T-cells were then added to the culture and IFNg secretion was measured after an overnight incubation. As shown in FIG. 68B, ADI-71739 alone was able to increase IFNγ secretion by the T cells, and this effect was augmented upon combination with Pembrolizumab/aPVRIG/aTIGIT.

### In Vitro Studies Testing the Effects of ADI-71739 on Human TIL Function in the Presence of Endogenous IL-18BP Levels

[0793] As shown in FIG. 69, Anti-IL18BP antibody ADI-71739 increased IFNg release by tumor infiltrating lymphocytes. A. Schematic representation of assay setup. MEL624 cells were co-cultured with human TILs that were previously enriched for MARTI or gp100 peptide-specific clones. IL-18 (3.7 ng/ml) was added to the co-culture along with 5 μg/ml ADI-71739 or isotype control. The co-culture was set for 18 hours following which IFNg levels were measured in supernatants. B. IFNg levels were increased in co-cultures treated with ADI-71739 (turquoise) as compared with isotype-treated samples (black). Representative examples from two TIL donors are shown.

### Bound IL-18 Levels in the TME are Above Required Amount for T Cell Activation In Vitro

### Methods:

[0794] Human MEL624 cells were thawed and grown in DMEM with 10% FBS, 1% Glutamax, 1% Penicillin-Streptomycin Solution and 1% HEPES buffer. The cells were then seeded at 75 k cells/well in a 96 well plate in the assay medium (IMDM with 10% human serum, 1% Glutamax, 1% MEM eagle, 1% Sodium Pyruvate and 1% Penicillin-Streptomycin Solution) and incubated 1 hour in 37° C., 5% CO₂ incubator before co-culture with human tumor infiltrating lymphocytes that were previously expanded using known melanoma antigens (TILs). Human TILs were thawed in full TIL media and 75 k cells/well were co-cultured with the MEL624 cells to create an effector:target ratio of 1:1. The co-cultured cells were then treated with rhIL-18 (1.23-300 ng/ml). Cells and all added solutions were prepared in full assay medium to a final volume of 200 μl/well. Plates were incubated for 24 hours in 37° C., 5% CO₂ incubator, after which the supernatant was collected for cytokine secretion evaluation. All tests were done in triplicates.

[0795] Tumor were cut into small pieces with a scalpel and transferred to GentleMACs™ C tubes (Miltenyi Biotec) containing an enzyme mix using human tumor Dissociation Kit (Miltenyi Biotec), as per the manufacturer's protocol. After dissociation, samples were centrifuged at 300 g for 5 minutes and supernatants were collected and recentrifuged at 3130 g for 10 minutes. Following centrifugation, supernatants were recollected and distributed in aliquots for storage at −80c. At the day of the assay, samples were thawed at room temperature and subsequently centrifuged at 14,000 RPM for 10 min and supernatants were collected for immediate usage in ELISAs with the following kits:
[0796] Human IL18 ELISA kit (MBL, 7620)
[0797] Human IL18 free detection kit (in house protocol)

### Human Free IL18 ELISA Protocol:

[0798] Anti-human IL18 hIgG1 clone 12GL (patent US 2014/0004128A1) was diluted to 1 ug/ml in PBS and coated on ELISA plate overnight at 4° C. (100 μl/well). Coated plates were washed three times with PBST and incubated with 300 μl blocking buffer (1% BSA in PBS) at room temperature (RT) for 2 hrs. Blocking buffer was removed and plates were washed three times with PBST. Human healthy donor serums were diluted 1:2 with 1% BSA in PBS. Standard curve was generated by incubating 2-fold serial dilutions of human IL18 (starting at 1 ng/ml) in 1% BSA in PBS. Plates were washed three times with PBST buffer (1×PBS pH 7.4, 0.05% Tween20 and 100 μl/well biotinylated anti-IL18 detection antibody, cat. D0456 R&D; 1:1000 diluted in 1% BSA in PBS was added. This was incubated for 1 hr and plates were washed again as described above after antibody binding. 100 μl/well horse radish peroxidase HRP-conjugated streptavidin, Jackson, 1:1000 was added, and plates were incubated for 1 hr at RT. plates were washed again as described above after antibody binding. ELISA signals were developed in all wells by adding 50 μL of TMB substrate (Scytek) and incubating for 5-20 mins. The HRP reaction was stopped by adding 50 μL 1N HCL and absorbance signals at 450 nm were read (EnSpire, Perkin Elmar). The assay was done in duplicate. Data was analyzed using GraphPad Prism software

### Results:

[0799] A schematic representation of assay setup is shown in FIG. 70A, thawed tumor infiltrating lymphocytes (TILs), co-cultured with MEL624 cells in a 1:1 ratio, were treated with rhIL-18 (R&D systems, 1.23-300 ng/ml) for 24 hr. As can be seen in FIG. 70B, rhIL-18 increased IFNγ secretion in a dose-dependent manner. rhIL-18 activates TILs in concentration above ˜1 ng/ml and reached saturation at ˜100 ng/ml.

[0800] FIG. 70C: Levels of bound IL-18 in TDS across indications are mostly above the level required for in vitro T cell activation. Bound IL18 levels were calculated by deducting IL18 free from total IL-18 measured for each sample by two separate ELISA kits. Dashed red line represent the level required for functional activity (1.5 ng/gr). Black lines represent the median level bound IL-18 for each tumor type.

### Example 16: Generation and Characterization of Custom Abs Against Mouse IL18-BP Protein

### Methods:

### Generation of Fab's Against Mouse IL18-BP Protein

[0801] Fab's were raised at AbD Serotec (Bio Rad, Germany) using Human Combinatorial Antibody Library (HuCAL®) production service. The HuCAL® library is based on the human IgG1 Fab format, which consists of the first two domains of the antibody heavy chain and the complete light chain.

### Study Design

[0802] Generation of Fab's against mouse IL18-BP was performed at AbD Serotec (Bio Rad, Germany). Antibodies against the mouse IL18-BP protein were raised using the HuCAL® phage library, using 3 rounds of enrichment and counter selection against non-related human IgG1 fusion protein for the depletion of unspecific antibodies. Next, the enriched antibody pool from the phage display vector was subcloned into expression vector to determine the final Fab format. The selected Fab format is Fab-FH (Monovalent Fab mini Ab containing a Flag and 6 His tag) The antibodies were raised using the mouse IL18-BP Fc fusion protein, mouse IL18-BP fused to human IgG1.

### Anti-Mouse IL18-BP Fab's Generation

[0803] Fab's generation at AbD Serotec included the following steps:
[0804] 1. Antigen immobilization—immobilization of the antigen on a solid support. The standard method uses covalent coupling to magnetic beads.
[0805] 2. Phage display selection-panning—The HuCAL® platinum library presented on phage particles is incubated with the immobilized antigen. Nonspecific antibodies are removed by extensive washing and specific antibody phage are eluted by adding a reducing agent. An E. coli culture is infected with eluted phage and helper phage to generate an enriched antibody phage library for the next panning round. Typically, three rounds of panning.
[0806] 3. Subcloning into antibody expression vector—After panning, the enriched antibody DNA is isolated as a pool and subcloned into a Fab expression vector. E. coli are transformed with the ligation mixture and plated on agar plates. Each growing colony represents a monoclonal antibody at this stage.
[0807] 4. Primary screening—Colonies are picked and grown in a 384-well microtiter plate. Antibody expression is induced, and the culture is lysed to release the antibody molecules. Cultures are screened for specific antigen binding by ELISA.
[0808] 5. Secondary screening—K off ranking of top 95 ELISA-positive clones included using Bio-Layer Interferometry (BLI) technology on a label-free, dip-and-read biosensor platform (ForteBio Octet® RED384) Sequencing-Hits from the primary and secondary screening experiment are sequenced to identify unique antibodies.
[0809] 6. Expression and purification—The unique Fab's are expressed and purified using one-step affinity chromatography.
[0810] 7. Antibody QC—Purified Fab's are tested by ELISA using recombinant protein.
   Analysis of the mAbs Performance

### Binding Measurement of Anti-Mouse IL18-BP Abs to Mouse IL18-BP Protein by ELISA

[0811] Mouse IL18-BP His fusion protein (Sino Biological) was coated on the wells of a high binding plate overnight at 4° C. (2.5 μg/ml, 50 μl/well volume). Mouse anti histidine tag HRP was used to ensure mouse IL18-BP His coating (diluted 1:500 in blocking buffer). Coated plate was rinsed once with PBS and incubated with 250 μL blocking buffer (2.5% skim milk in PBS-indicated per experiment) at room temperature (RT) for 2 hr. Blocking buffer was removed, plate was rinsed once more with PBS, and incubated with anti-mouse IL18-BP Abs from Biorad (1:3, 5-0.002 μg/ml, 50 μL/well) for 2 hr at RT. Plate was washed 3 times with PBS-T (0.05% Tween20 in PBS), followed by one wash once with PBS, and incubated with HRP-conjugated secondary antibody (50 μL/well) for 1 hr at RT. Plate was washed 3 times with PBS-T, once with PBS, and incubated with TMB substrate solution (50 μL/well) at RT to allow signal development. The HRP reaction was stopped by addition of 1N HCl solution (50 μL/well), and absorbance signal was read at 450 nm on a luminescence Reader (EnSpire, Perkin Elmar). Data were exported to Excel (Microsoft) and plotted in GraphPad Prism (GraphPad Software, Inc.).

### Affinity Measurement to Mouse IL18-BP Protein by BiaCore

[0812] 1. Immobilization of anti-human Fc: all SPR measurements were performed with BiaCore T-100 instrument in PBS 0.05% Tween 25 running buffer. Series S CM5 chip (cat. BR100530 Cytiva) was primed for 7 min in running buffer. Normalization of the chip was performed with 8 min injection of 70% glycerol. Mouse antibody capture kit (cat. BR100838 Cytiva) was used for the capture. 0.4 M 1-ethyl-3-(3-dimethylaminopropyl)-carbodiimide in water was mixed with 0.1 M N-hydroxysuccinimide in water in 1:1 ratio and chip surface was activated for 420 sec at 10 μl/min. Next, 30 μg/ml of mouse Fc capture reagent diluted in immobilization buffer (10 mM sodium acetate pH 5.0, cat. BR100838 Cytiva) was injected at 5 μl/min over all 4 channels until ΔRU reached 12000RU. Chip was blocked with 1 M ethanolamine-HCl pH 8.5 at 10 μl/min for 7 min.
[0813] 2. Capturing of anti-mouse IL18-BP antibodies: For capture, AB-837 mIgG1 D265A (AbD35328) was diluted to 10 μg/ml in running buffer and injected at 5 μl/min rate over specific channel. CH1 was used for capture of isotype control (synagis mIgG1 D265A). The injection was stopped when capture levels reached ˜250 RU.
[0814] 3. Kinetic measurements of anti-mouse IL18-BP Ab: 12 two-fold serial dilutions of mouse IL18-BP-Fc (cat. 122-BP, R&D) starting from 256 nM diluted in running buffer was injected over all channels at 30 μl/min for 180 sec. Dissociation of the bound protein from captured antibodies was monitored for 1000 sec. Chip surface was regenerated with 10 μl/min injection of glycine-HCl pH 1.7 for 60 sec after each cycle. The resulting sensorgrams were processed and double-referenced using a Biacore T100 evaluation software. Where appropriate, the sensorgrams were fit with a simple 1:1 kinetic binding model.
   Blocking of mIL18-BP-mIL-18 Interaction by ELISA

[0815] Anti-mouse IL18-BP Abs from Biorad were tested for inhibition of mouse IL18-BP His fusion protein binding to IL-18 (Sino Biological) by ELISA. IL18-BP His fusion protein was coated on the wells of a high binding plate overnight at 4° C. (2.5 μg/ml, 50 μl/well volume). Coated plate was rinsed once with PBS and incubated with 250 μL blocking buffer (2.5% skim milk in PBS) for 2 hr in room temperature (RT). Buffer was removed and plate was washed and incubated with serial dilutions of anti-mouse IL18-BP Abs from Biorad, (1:2, 5-0.04 μg/ml, 50 μL/well) at RT for 30 min. Plate was washed and incubated with mouse IL-18 biotinylated in blocking buffer (1 μg/ml, 50 μL/well volume) at RT for 1 h. Plate was washed, and HRP-conjugated secondary antibody was added (50 μL/well) for 1 hr at RT. ELISA signal was develop as describe above. Blocking was calculated as a decrease in the binding signal of biotinylated mouse IL-18 to IL18-BP-His protein in the presence of an Ab compared to the binding signal in the presence of an isotype control.

Blocking of mIL18-BP-mIL-18 Interaction In-Vitro

[0816] Mouse CD3+ T cells were isolated from freshly harvested spleens of C57BL/6 mice using the EasySep™ Mouse T Cell Isolation Kit according to manufacturer's instructions and plated on anti-CD3-coated (10 μg/ml) T-75 cm² flasks at 0.8*10\hat{ }6 cells/ml. Anti-CD28 (1 μg/ml) was supplemented and cells were cultured for 3 days at 37° C., 5% CO₂. Cells were subsequently harvested, washed and cultured in the presence of rmIL-12 (2 ng/ml) for 24 additional hours. The next day, IL-18 and IL-18 BP were allowed to complex for 30 minutes at 37° C., 5% CO₂ in 96-well plates (25 μl from each/well) and anti-IL-18 BP mAbs (serial dilutions, 25 μl/well) were added for additional 30 minutes. Cells were harvested, washed, supplemented with rmIL-12 (0.1 ng/ml final) and added to the IL-18/IL-18 BP/anti-IL-18 BP containing wells (40K/25 μl/well) for 24 h at 37° C., 5% CO₂. Following the 24 h culture, supernatants were collected for IFNγ secretion analysis by the mouse Th1/Th2/Th17 Cytometric Bead Array (CBA, BD Biosciences).

### Results:

### Anti-Mouse IL18-BP Fab's Generation

[0817] The panning was performed at BioRad using mouse IL18-BP fused to Fc of hIgG1 protein in 3 rounds of selection and counter selection against non-relevant Fc tagged control protein (Recombinant Mouse IL-15R alpha Fc Chimera Protein R&D cat. 551-MR-100) for depletion of unspecific antibodies.

[0818] In the first screen ˜360 clones were examined for binding to mouse IL18-BP vs non-relevant protein by ELISA assay. Out of ˜360 clones, 150 were identified as positive binders to mouse IL18-BP. A secondary screen of top 95 ELISA-positive clones included koff ranking using Bio-Layer Interferometry (BLI) technology on a label-free, dip-and-read biosensor platform (ForteBio Octet® RED384, where Abs were ranked based on their slowest of rate. Confirmatory screen by ELISA resulted in 41 positives unique Fab's binders. Fab's were purified and their binding to mouse IL18-BP was confirmed by ELISA. The 41 Fab's were further analyzed by affinity measurement to mouse IL18-BP protein, blocking activity and binning (ELISA, data not shown). Eleven Fab's, which belonged to the same bin, showed high blocking and binding activity were identified.

[0819] Reformation of the Fab's into full length immunoglobulin was done by BioRad. The conversion to mouse IgG1 D256A was done to top 6 Fab's (AbD35357, AbD35327, AbD35346, AbD35328, AbD35350, AbD35344).

Analysis of the mAbs Performance

### Affinity Measurement to Mouse IL18-BP Protein by ELISA

[0820] The affinity of the 6 BioRad purified mAbs against mouse IL18-BP was analyzed by ELISA. As shown in FIG. 16, anti-mouse IL18-BP, AbD35328 (also called “AB-837”, “837”, “Ab837”) binds mouse IL18-BP His fused protein (2.5 g/ml) with Kd value of 0.4 nM.

### SPR Kinetic Measurement of Anti-Mouse IL18-BP (AbD35328)

[0821] The binding of anti-mouse IL18-BP mAb, AbD35328, to mouse IL18-BP-Fc protein is demonstrated in FIG. 17. For this interaction, k off constant was below the limit of detection of the instrument (<10\hat{ }−9 l/S) and ka=4.93*10\hat{ }4 l/M*s. KD value couldn't be uniquely determined, and it was estimated that the value is below 1*10\hat{ }−12M.

Analysis of mAbs Performance in Functional Blocking of mIL18-BP-mIL-18 Interaction

[0822] The blocking activity of the 6 BioRad purified mAbs against mouse IL18-BP was analyzed by ELISA. As shown in FIG. 18, anti-mouse IL18-BP Ab (1:2, 5-0.04 μg/ml 2.5% skim milk in PBS), showed dose dependent blocking effect as compared to isotype control. IC50 value for anti-mouse IL18-BP (AbD35328) is 3.3 nM (FIG. 19).

Analysis of mAbs Performance in Blocking of mIL18-BP-mIL-18 Interaction in an In-Vitro T Cell Activation Assay

[0823] The functional blocking activity of the BioRad purified mAbs against mouse IL18-BP was evaluated in a T cell activation assay. As shown in FIG. 20, anti-mouse IL18-BP Ab (AbD35328) showed a dose dependent blocking effect by enhancing the IFNγ secretion as compared to isotype control. EC50 value for anti-mouse IL18-BP is 7.9 nM (FIG. 21).

### Example 17: Efficacy of Anti IL-18BP as Monotherapy and in Combination with Immune Checkpoints Blockers

[0824] This example describes the efficacy of anti-mouse IL18-BP mAb treatment in CT26 murine colon carcinoma model, B16/Db-hmgp100 melanoma model, MC380VA^{dim} CRC model and E0771 triple negative breast cancer (TNBC) model as monotherapy or in combination with immune checkpoints blockers.

### Materials and Methods

### Tumor Challenge Experiments:

[0825] CT26 colon carcinoma was purchased from ATCC (CRL-2638). Cells were cultured in RPMI 1640 (Biological Industries, 01-100-1A) with 10% FBS (Biological Industries, 04-127-1A), and 100 μg/mL penicillin/streptomycin (Biological Industries, 03-031-1B). For tumor implantation, cells were harvested and washed, counted, suspended in cold RPMI 1640 and placed on ice. BALB/c mice ((female, 8 wk) Envigo), were anesthetized with 10% Ketamine (Clorketam; SAGARPA Q-7090-053 and 10% Xylazine (Sedaxylan; BE-V254834) mixture injected intraperitoneal. Next, the back of the mice was shaved and disinfected with a 70% Ethanol solution. Tumor cells were injected as 50 μl of 2.5×10⁵ CT26 cells subcutaneously into the back right flank of mice.

[0826] B16/Db-hmgp100 cells were kindly provided by Dr. Hanada et al. (HHS agency) and were licensed from NIH. B16/Db-hmgp100 cells were generated by double transduction of B16F10 with H-2 Db and a retrovirus that encodes chimeric mouse gp100 that is comprised of the human gp100₂₅₋₃₃ and the rest of mouse gp100. Cells were cultured in RPMI 1640 (Biological Industries, 01-100-1A) with 10% FBS (Biological Industries, 04-127-1A), and 100 μg/mL penicillin/streptomycin (Biological Industries, 03-031-1B), 1% Glutamax (Life technologies, 35050-038, 1% Sodium pyruvate (Biological Industries, 03-042-1B), 0.01% 2-mercaptoethanol (Life technologies, 31350-010, 10 μg/ml Blasticidin (InvivoGen, ant-bl-05). 1×10⁵ B16/Db-hmgp100 cells subcutaneously into the back right flank of mice.

[0827] In both CT26 and B16/Db-hmgp100 models mAb administration started at day 4 (mono treatment) or day 7 post tumor inoculation when tumors were at volume of 30-50 mm³ (combo treatment); and was given intra-peritoneal (i.p.) in a final volume/injection of 200 μl, for 3 wks for a total of 6 administrations. Tumor growth was measured with electronic caliper every 2-3 days and was reported as 0.5×W2×L mm³. Mice were sacrificed with CO₂ at either study termination or any of the following clinical endpoints: tumor volume≥1800 mm³, tumor ulceration, body weight loss≥20%, or moribund appearance.

[0828] MC380VA^{dim} cells (clone UC10 4H10) were received from the Peter MacCallum cancer center. Cells were grown in DMEM or RPMI media containing 10% FBS, 1% Glutamax, 1% Sodium pyruvate, 0.01% 2-mercaptoethanol, 1% Penicillin-Streptomycin, 1% HEPES, 1% NEAA. MC380VA^{dim} cells (10⁶ or 1.2×10⁶) cells in 50 μl/mouse were injected subcutaneously into the right flank of the mouse. At a tumor volume of 130-260 mm³ mice were randomly assigned into treatment groups. Mice were treated with 15 mg/kg Synagis isotype control or with AB-837 mAbs injected twice a week for a total of 6 treatments. Tumor growth was measured with an electronic caliper every 2-3 days and was reported as 0.5×W2×L mm³. The experimental endpoint is defined at tumor volume of 1800 mm³. Mice with body weight loss of above 10% between measurements, or 20% reduction from initial weight were excluded.

[0829] E0771 murine TNBC model was purchased from CH3 BioSystems (Product: #94A001). Cells were cultured in RPMI 1640 (Biological Industries, 01-100-1A) with 10% FBS (Biological Industries, 04-127-1A), and 100 μg/mL penicillin/streptomycin (Biological Industries, 03-031-1B). For tumor implantation, cells were harvested and washed, counted, and suspended to 10⁷ cells/ml in cold RPMI 1640 and placed on ice. C57BL/6 mice ((female, 8 wk) Envigo), were anesthetized with 10% Ketamine (Clorketam; SAGARPA Q-7090-053) and 10% Xylazine (Sedaxylan; BE-V254834) mixture injected intraperitoneally. Next, tumor cells were injected with mixture containing 50 μl of 5×10⁵ E0771 cells and 50 μl of Matrigel Matrix (Corning; 354234, orthotopically into the right third mammary fat pad of C57BL/6 mice. At tumor volume of 330 mm³, mice were randomly assigned into treatment groups of n=10. Mice were treated with 15 mg/kg Synagis D265A isotype control, AB-837 mIgG1-D265A and combination with anti-PD-L1. The mAbs were injected twice a week for a total of 6 treatments. Tumor growth was measured with an electronic caliper every 2-3 days and was reported as 0.5×W2×L mm³. The experimental endpoint is defined at tumor volume of 1800 mm³. Mice with body weight loss of above 10% between measurements, or 20% reduction from initial weight were excluded.

### Antibodies:

[0830] The phage display anti-mouse IL18-BP mAb (AbD35328) used in this study, engineered as a mouse IgG1 D265A isotype monoclonal antibody (mAb) was shown to bind to IL18-BP in ELISA assay and block binding of mIL-18 to IL18-BP. The anti-mouse PD-L1 inhibitor, on a mIgG1 backbone, used in this study was mAb YW243.55.S70 which was described in WO 2010/077634 (heavy and light chain variable region sequences shown in SEQ ID NOs. 20 and 21, respectively, of WO 2010/077634, having a sequence disclosed therein.

[0831] All mAbs were formulated in sterile PBS and were low in endotoxin (<0.05 EU/mg).

TABLE 4
Tested mAbs.

| | | |
|---|---|---|
| 1 | Mouse IgG1 | |
| 2 | Mouse IgG1 D265A | |
| 3 | Benchmark anti PD-L1(mIgG1) | YW243.55.S70 |
| 4 | Anti-IL18-BP mAb Mouse IgG1 D265A | AbD35328 |
| 5. | Anti PVRIG mAb 407 mAb mouse IgG1 | BOJ-5G4-F4 |
| 6. | Anti TIGIT mAb mouse IgG1 | CPA.9.086 M1 |

### Study Design for CT26 and B16/Db-hmgp100 Models

### Mono Treatment

[0832] Six-eight weeks old female BALB/c (for CT26) or C57BL/6 (for B16/Db-hmgp100 and E0771) mice were purchased from Envigo and acclimated in SPF animal facility for 1 week prior to beginning the experiment. Mice were anesthetized, shaved and inoculated subcutaneously with 50 μl of 2.5×10⁵ CT26 or 1×10⁵ B16/Db-hmgp100 or 5×10⁵ E0771 cells tumor cells.

[0833] At day 4 post tumor inoculation mice were treated with mAbs (as detailed below) injected on day 4, 7, 11, 14, 18 and 21 post inoculation. Tumor growth was measured with caliper every 2-3 days.

TABLE 5
Treatment groups.

| # | | Dose | # | Vol/Dose |
|---|---|---|---|---|
| Group | Treatment/mAb | (mg/Kg) | Dose | (ul) |
| 1 | mIgG1 iso Ctrl | 5 | 6 | 200 |
| 2 | mIgG1- D265A iso Ctrl | 15 | 6 | 200 |
| 3 | Anti-PD-L1 mIgG1 | 5 | 6 | 200 |
| 4 | Anti-IL18-BP mAb mIgG1 | 15 | 6 | 200 |
| | D265A | | | |
| 5 | Anti-TIGIT mAb mIgG1 | 10 | 6 | 200 |
| 6 | Anti-PVRIG 407 mAb mIgG1 | 10 | 6 | 200 |

### Combo Treatment

[0834] For combination of anti-IL18-BP with anti-mPD-L1 mAbs treatments, at day 7 post tumor inoculation, mice were randomly assigned into treatment groups of n=10 as described below. Mice were treated with mAbs (as detailed below) injected on day 7, 11, 14, 18, 21 and 25 post tumor inoculation. For combination of anti-IL18-BP with anti-TIGIT or anti-PVRIG the administration of anti-IL18-BP, anti-PVRIG, anti-TIGIT and control Synagis mIgG1-D265A (anti-IL18-BP) and mIgG1 (anti-PVRIG, anti-TIGIT), initiated on day 4 post inoculation. Mice were treated with mAbs (as detailed below) injected on days 4, 7, 11, 14, 18 and 21 post inoculation.

TABLE 6
Treatment dosages.

| # | | Dose | | Dose | # | Vol/Dose |
|---|---|---|---|---|---|---|
| Group | Treatment/mAb 1 | (mg/Kg) | Treatment/mAb 2 | (mg/Kg) | Dose | (μl) |
| 1 | mIgG1 iso Ctrl | 5 | mIgG1 D265A iso | 15 | 6 | 200 |
| | | | Ctrl | | | |
| 2 | Anti-PD-L1 | 5 | mIgG1 D265Aiso | 15 | 6 | 200 |
| | mIgG1 | | Ctrl | | | |
| 3 | Anti-PD-L1 | 5 | Anti-IL18-BP mAb | 15 | 6 | 200 |
| | mIgG1 | | mIgG1 D265A | | | |
| 4 | Anti-TIGIT mAb | 10 | Anti-IL18-BP mAb | 15 | 6 | 200 |
| | mIgG1 | | mIgG1 D265A | | | |
| 5 | Anti-PVRIG 407 | 10 | Anti-IL18-BP mAb | 15 | 6 | 200 |
| | mAb mIgG1 | | mIgG1 D265A | | | |

### Study Design for E0771 Model

[0835] At tumor volume of 330 mm³, mice were randomly assigned into treatment groups of n=10. Mice were treated with 15 mg/kg Synagis D265A, 837 mIgG1-D265A and combination with anti-PD-L1, mAbs injected twice a week for a total of 6 treatments.

TABLE 7
Treatment groups.

| # | | Dose | # | Vol/Dose |
|---|---|---|---|---|
| Group | Treatment/mAb | (mg/Kg) | Dose | (ul) |
| 1 | mIgG1 isotype control | 5 | 6 | 200 |
| 2 | mIgG1- D265A isotype control | 15 | 6 | 200 |
| 3 | Anti-PD-L1 mIgG1 | 5 | 6 | 200 |
| 4 | Anti-IL18-BP mAb mIgG1 | 15 | 6 | 200 |
| | D265A | | | |

TABLE 8
Treatment dosages.

| # | | Dose | | Dose | # | Vol/Dose |
|---|---|---|---|---|---|---|
| Group | Treatment/mAb 1 | (mg/Kg) | Treatment/mAb 2 | (mg/Kg) | Dose | (μl) |
| 1 | mIgG1 isotype | 5 | mIgG1 D265A | 15 | 6 | 200 |
| | control | | isotype control | | | |
| 2 | Anti-PD-L1 | 5 | mIgG1 D265A | 15 | 6 | 200 |
| | mIgG1 | | isotype control | | | |
| 3 | Anti-PD-L1 | 5 | Anti-IL18-BP mAb | 15 | 6 | 200 |
| | mIgG1 | | mIgG1 D265A | | | |

### Statistical Analysis:

[0836] Two-way ANOVA with repeated measures, followed by two-way ANOVA with repeated measures for selected pairs of groups using JMP (Statistical Discoveries™) software. Analyses of tumor growth measurements were performed by comparing tumor volumes measured on the last day on which all study animals were alive. Statistical differences in percentage of mice tumor free were determined by a Log Rank Mantel-Cox test. Values of P<0.05 were considered significant. * p<0.05; ** p<0.01; *** p<0.001. For each experiment, the number of replicates performed and the number of animals per group are described in the corresponding figure legend(s).

### Results

[0837] Monotherapy activity of anti-IL18-BP and anti-mPD-L1 in syngeneic CT26 Mouse Tumor Model

[0838] The effect of anti-IL18-BP monotherapy in mouse syngeneic CT26 tumor model was assessed and compared to monotherapy with anti-mPDL1. Mice were treated with isotype control antibody (mIgG1 or mIgG1 D265A), or with anti-PD-L1 mIgG1 antibody (YW243.55.S70) or mIgG1 D265A anti-IL18-BP (mAb AbD35328).

[0839] In a semi-therapeutic treatment model of CT26 colon carcinoma, monotherapy with anti-PD-L1 resulted in tumor growth rates similar to treatment with mIgG1 isotype control, albeit with a statistically significant benefit to mice survival. Mice in group treated with anti-IL18-BP mAb as a monotherapy, showed similar tumor growth rates to mice treated with mIgG1 D265A isotype control without survival benefit (FIG. 22).

### Activity of Anti-IL18-BP and Anti-PD-L1 Combination in Syngeneic CT26 Mouse Tumor Model

[0840] Next, the efficacy of anti-IL18-BP and anti-PD-L1 combination therapy in mouse syngeneic tumor model was assessed.

[0841] In a therapeutic treatment model of CT26 colon carcinoma, administration of anti-PD-L1 with control mIgG1 D265A isotype treatment, initiated on day 7 post inoculation, did not affect tumor growth, while combination of anti-IL18-BP mAb with anti-PD-L1 elicited significant TGI (52%, P=0.03, FIG. 22), higher rates of response with 4 out of 10 individuals demonstrating tumor volumes below 200 mm³ translated into a statistically significant benefit of mouse survival (P<0.05, FIG. 22) and promoted increased and durable antitumor activity.

### Monotherapy Activity of Anti-IL18-BP in MC38OVAdim Mouse Tumor Model

[0842] To validate the anti-tumor activity of anti-mouse IL18BP, AB-837, as a single agent, mice inoculated with MC380VA^{dim} tumor cells were administered with 15 mg/kg of AB-837 or isotype control. Monotherapy with AB-837 resulted in a 58% TGI (p<0.005, FIG. 78A).

### Monotherapy Activity of Anti-IL18-BP and Anti-mPD-L1 in Syngeneic B16/db-Hmgp100 Mouse Tumor Model

[0843] We further explored the anti-tumor activity of AB-837 in a less immune infiltrated mouse melanoma tumor model B16/Db-hmgp100 either as monotherapy or in combination with anti PD-L1 Ab.

[0844] Mice were treated with isotype control antibody (mIgG1 or mIgG1 D265A), or with anti-PD-L1 mIgG1 antibody (YW243.55.S70) or mIgG1 D265A anti-IL18-BP (mAb AbD35328).

[0845] In a B16/Db-hmgp100 melanoma tumor model, monotherapy with anti-PD-L1 resulted in tumor growth rates similar to treatment with mIgG1 isotype control, without benefit to mice survival. Mice in group treated with anti-IL18-BP mAb as a monotherapy, showed 31.4% tumor growth inhibition compared to mIgG1 D265A isotype control, with a trend to statistical significance (p=0.09, FIG. 23). In additional experiment treatment with anti-IL18-BP mAb resulted in 54% TGI ((p<0.005, FIG. 78B).

### Activity of Anti-IL18-BP and Anti-PD-L1 Combination in Syngeneic B16/db-Hmgp100 Mouse Tumor Model

[0846] Next, the activity of anti-IL18-BP and anti-PD-L1 combination therapy in B16/Db-hmgp100 mouse syngeneic tumor model was assessed.

[0847] In of B16/Db-hmgp100 melanoma tumor model, administration of anti-PD-L1 with control mIgG1 D265A isotype control treatment, initiated on day 7 post inoculation, resulted in 30.8% tumor growth inhibition compared to mice treated with isotype control (P=0.07, FIG. 23). Whereas a combination of anti-IL18-BP mAb with anti-PD-L1 elicited 31.1% of TGI compared to anti-PD-L1 monotherapy, and a significant TGI (52%, P=0.0023, compared to mice treated with isotype control treatment (FIG. 23). Only mice treated with a combination of anti-IL18-BP mAb with anti-PD-L1 reached to statistically significant improvement in survival compared to control groups (P<0.05, FIG. 23).

### Activity of Anti-IL18-BP and Anti-TIGIT Combination in B16/db-Hmgp100 Syngeneic Mouse Tumor Model

[0848] Next, we assessed the activity of anti-IL18-BP and anti-TIGIT combination therapy in B16/Db-hmgp100 mouse syngeneic tumor model.

[0849] Mice treated with either anti-IL18-BP mAb or with ant-TIGIT mAb as monotherapies showed 34% (p=0.0594 and 43% TGI (p=0.0105) compared to mice treated with isotype control, respectively (FIG. 24). However, when mice were treated with a combination of anti-IL18-BP and anti-TIGIT mAbs, 35% and 24% TGI was exhibited compared to anti-IL18-BP and anti-TIGIT monotherapies, respectively. Moreover, these mice exhibited 57% (p=0.02, FIG. 24) TGI compared to group treated with isotype control mAbs. This effect was also translated into a significant improvement in mice survival (p=0.013, FIG. 24).

### Activity of Anti-IL18-BP and Anti-PVRIG Combination in B16/db-Hmgp100 Syngeneic Mouse Tumor Model

[0850] The activity of anti-IL18-BP and anti-PVRIG combination therapy in B16/Db-hmgp100 mouse syngeneic tumor model was also assessed.

[0851] While mice treated with anti-IL18-BP mAb monotherapy exhibited 34% (p=0.0594) TGI, mice treated with anti-PVRIG had a comparable tumor growth to mice treated with isotype control mAbs (FIG. 25). None of the monotherapies significantly improved mice survival. However, when mice were treated with a combination of anti-IL18-BP and anti-PVRIG mAbs, a statistically significant TGI was shown (44%, p=0.0034) compared to mice treated with isotype control, which further resulted in a significantly improved mice survival (p=0.0034) (FIG. 25).

Anti IL18-BP Activity as Monotherapy and in Combination with Anti-mPD-L1 in Orthotopic E0771 Mouse Tumor Model

[0852] Monotherapy with anti-mouse IL18 bp mAb, 837 mIgG1-D265A, in E0771 tumor bearing mice leads to 83% TGI (P<0.0001) compared to synagis D265A isotype control (FIG. 72). A combination treatment of 837 mIgG1-D265A with aPD-L1 results in potentiated response, with 61% TGI compared to AB-837 administration as a monotherapy (p=0.029 and 91% TGI compared to isotype control (FIG. 72, p<0.0001). These anti-tumor responses were translated into significant survival benefit: combination of 837 mIgG1-D265A with anti-PD-L1 significantly (P=0.004) increased the survival of mice compared to monotherapy with 837 mIgG1-D265A (P=0.01).

### Conclusions

[0853] The studies described in this example evaluated the in vivo anti-cancer efficacy of mAb directed against IL18-BP as a monotherapy or in combination with anti-PD-L1, anti-TIGIT or anti-PVRIG mAbs in 3 syngeneic mouse tumor models, CT26, B16/Db-hmgp100 and E0771.

[0854] In CT26 and B16/Db-hmgp100 tumor models, treatment with 15 mg/kg (300 μg/mouse) of anti-IL18-BP as a monotherapy in a minimal disease set-up, i.e., treatment initiation on day 4, resulted in increased TGI (0-35%) without a statistically significant survival advantage. However, when anti-IL18-BP mAbs were administered in combination with anti-PD-L1, anti-TIGIT or anti-PVRIG treatments, a synergism was exhibited by a statistically significant tumor growth inhibition and increased survival of mice.

[0855] In E0771 tumor model, treatment with 15 mg/kg (300 μg/mouse) of anti-IL18BP Ab as a monotherapy resulted in a significant anti-tumor activity (83% TGI) compared to control group. The activity of anti-IL-18BP Ab was further increased when it was administrated in combination with anti PD-L1 treatment.

[0856] In MC38OVAdim tumor model, treatment with 15 mg/kg (300 μg/mouse) of anti-IL18BP Ab as a monotherapy resulted in a significant anti-tumor activity (58% TGI) compared to control.

[0857] An in vivo effect of combining anti-IL18-BP with anti-mPD-L1 treatment was also demonstrated in MC38ova (data not shown).

### Example 18: Monotherapy with Anti-IL18BP Mab Induces Immunogenic Memory in E0771 Tumor Model

[0858] This example describes the ability of anti IL18-BP Ab to induce immunogenic memory.

### Materials and Methods

### Tumor Challenge Experiments:

[0859] E0771 murine TNBC model was purchased from CH3 BioSystems (Product: #94A001). Cells were cultured in RPMI 1640 (Biological Industries, 01-100-1A) with 10% FBS (Biological Industries, 04-127-1A), and 100 μg/mL penicillin/streptomycin (Biological Industries, 03-031-1B). For tumor implantation, cells were harvested and washed, counted, and suspended to 10⁷ cells/ml in cold RPMI 1640 and placed in ice. C57BL/6 mice ((female, 8 wk) Envigo), were anesthetized with 10% Ketamine (Clorketam; SAGARPA Q-7090-053) and 10% Xylazine (Sedaxylan; BE-V254834) mixture injected intraperitoneally. Next, tumor cells were injected in mixture containing 50 μl of 5×10⁵ E0771 cells and 50 μl of Matrigel Matrix (Corning; 354234, orthotopically into the right third mammary fat pad of C57BL/6 mice. The administration of mAbs started at day 11 post tumor inoculation when tumors were at volume of 270 mm³; and was given intra-peritoneal (i.p.) in a final volume/injection of 200 μl, for 3 weeks for a total of 6 administrations. Tumor growth was measured with electronic caliper every 2-3 days and was reported as 0.5×W2×L mm³. Mice were sacrificed with CO₂ at either study termination or any of the following clinical endpoints: tumor volume≥1800 mm³, tumor ulceration, body weight loss≥20%, or moribund appearance.

### Tumor Re-Challenge Experiments:

[0860] For tumor re-challenge experiments, ninety days after primary E0771 inoculation, mice treated with anti-mouse IL18-BP mAbs and rejected primary tumors, and naïve age-matched female C57BL/6 mice, were re-challenged with 5×10⁵ E0771 cells in the left third mammary fat pad (FIG. 27A). Tumor growth was monitored as described above.

### Results:

### Monotherapy Activity of Anti-IL18-BP and Anti-mPD-L1 in Syngeneic E0771 Orthotopic Mouse Tumor Model

[0861] In E0771 tumor model mice were treated with a anti-PD-L1 mIgG1 antibody (YW243.55.S70) or with anti-IL18-BP mIgG1 D265A antibody (mAb AbD35328).

[0862] In orthotopic E0771 TNBC model, monotherapy with anti-PD-L1 resulted in tumor growth inhibition of 38.2% (p=0.72) compared to treatment with mIgG1 isotype control, with a benefit to mice survival (p=0.0362). Mice in group treated with anti-IL18-BP mAb as a monotherapy, showed 94.2% (p=0.0113) tumor growth inhibition compared to mIgG1 D265A isotype control (FIG. 26). This anti-tumor response was translated into a statistically significant survival benefit (p=0.0011, FIG. 26). A tumor growth inhibition of 81.6% was detected when comparing the therapeutic effects of anti-IL18-BP with the effects of anti-PD-L1.

### E0771 Orthotopic Tumor Re-Challenge Model to Assess Generation of Immune Memory

[0863] Since monotherapy with anti IL18-BP mAb induced a complete rejection of E0771 tumors in mice, we examined whether the treatment induces generation of immunological memory by re-challenging mice without evident residual tumors (complete responders). Mice were treated with 15 mg/kg anti IL18-BP Ab or isotype control. Two months after primary tumor inoculation, mice with no evident residual tumors and tumor-naïve aged-matched mice were re-inoculated with 5×10⁵ E0771 tumor cells. Five out of ten tumor-naïve mice had tumor progression, while none of the mice completely rejecting primary tumors (5/5) developed tumors (FIG. 27A, B and C). In an additional experiment, 8/9 re-challenged mice rejected the tumors, in contrast to 1/9 tumor-naïve mice. Spleen weight was significantly increased in rechallenged mice compared to tumor-naïve (P=0.004, FIG. 27D). Moreover, we encountered a significant increase in percentage of CD44+CD62L CD8+ effector T cells (22%, p=0.02, FIG. 5E) and CD19+ cells (20%, p=0.04, FIG. 27F) in rechallenged mice compared to tumor-naïve mice. No other statistically significant differences were detected. Overall, these results show that a systemic memory was induced by anti-IL18 bp monotherapy in mouse E0771 model.

### Example 19: Administration of Anti-IL18BP is Expected to have A Better Therapeutic Potential than Engineered IL-18

### Material and Methods

### Mouse Antibodies and Recombinant Proteins

[0864] All mAbs and recombinant proteins were formulated in sterile PBS and were low in endotoxin (<0.05 EU/mg).

### Cell Culture:

[0865] Nine days pre-inoculum, vials of MC38ovadim cells were thawed into RPMI media containing 10% FBS, 1% Glutamax, 1% Sodium pyruvate, 1% HEPES, 1% NEAA, 0.01% 2-mercaptoethanol, 1% Penicillin-Streptomycin. Following centrifugation at 300×g for 8 min, cell pellet was resuspended, counted and seeded in a T175 flask. On days −7, −5 and −2, the cells were detached and re-seeded at 6-8*10⁶ cells/T175 flask. On the day of inoculum, the cells were detached, centrifuged at 300×g for 10 min, filtered through 40 μM cell strainer and resuspended in RPMI.

### Inoculation of Mice:

[0866] Experiments were performed in C57Bl/6 (female, 6-8 wk, Envigo). Mice were anesthetized with 10% Ketamine and 10% Xylazine mixture injected intraperitoneal. Next, mice were inoculated with MC38ova cells (1.2×10⁶) subcutaneously to the right flank in 50 μl/mice. Tumor growth was measured with an electronic caliper every 2-3 days and was reported as 0.5×W2×L mm³.

Administration of Anti-mIL18BP and Engineered mIL-18 to Tumor-Bearing Mice:

[0867] At tumor volume of ˜120 mm³ (day 9, mice were randomly assigned into treatment groups. Mice were treated with Synagis mouse IgG1, k isotype control 15 mg/kg (IP), anti-mIL18 bp 837 mIgG1 15 mg/kg (IP), PBS (SC), or engineered IL-18 (SC) 0.32 mg/kg. Treatments were injected twice a week for a total of 6 treatments. Tumor growth was measured with caliper every 2-3 days. Mice were weighed every week. Mice were bled before the 4^{th} treatment, 4 hours after the 4^{th} treatment, and 24 hours after the 4^{th} treatment. Serum was analyzed for presence of IFNg, TNFa, MCP1, IL6 by Cytometric Bead Array (CBA) Mouse Inflammation Kit (BD Cat. No. 552364). Spleens were harvested from mice 24 hours after the 4th treatment and weighed. For IL15 experiments, mice were treated with a single dose of 0.5 μg, 1.5 μg of IL15, or with a mix of 0.5 μg IL15 and 2.33 μg IL15R.

[0868] Engineered IL-18 (also referred to as DR-18; Sequence is from US Patent Publication 20190070262A1, listed therein as mCS2 (SEQ ID NO: 61)) was shown not to bind IL18-BP:

HFGRLHCTTAVIRNINDQVLFVDKRQPVFEDMTDIDQSASEPQTRLIIYA
YGDSRARGKAVTLSVKDSKMSTLSCKNKIISFEEMDPPENIDDIQSDLIF
FQKRVPGHNKMEFESSLYEGHFLACQKEDDAFKLILKKKDENGDKSVMFT
LTNLHQSHHHHHH

### Results:

Analysis of MC38ovadom Tumor-Bearing Mice Treated with Anti-mIL18 BP and Engineered mIL-18:

[0869] When treating mice with anti-mIL18 bp, no loss of weight was observed, similar to control group (FIG. 73A). When analyzing blood serum from mice treated with anti-mIL18 bp, no increase in inflammatory cytokines IFNg, TNFa, MCP1 and IL6 was observed. In contrast, mice treated with engineered mIL-18 had elevated serum levels of IFNg, TNFa, MCP1 and IL6, 4 hours after the 4^{th} treatment, and elevated serum levels of IFNg 24 hours after the 4^{th} treatment (FIG. 73B). Mice treated with engineered mIL-18 had very high serum levels of IL18 (method of IL18 detection identifies also engineered IL18, 4 hours after the 4^{th} treatment, which returned to baseline by 24 hours after the 4^{th} treatment (FIG. 73C). Spleens harvested from mice 24 hours after the 4^{th} treatment of anti-mIL18 bp were similar to spleens harvested from mice in control groups, while spleens harvested from mice treated with engineered mIL-18 were larger by an average of 4.9 folds compared to control (FIG. 73D). Similarly, spleens harvested from mice treated with varying concentrations of IL-15 were larger than controls (FIG. 73E).

### Example 20: Anti-IL-18BP Antibody Modulates Tumor Microenvironment without Effecting Periphery in Murine Tumor Model

[0870] To further understand the effects of mouse anti-IL-18BP Ab on the tumor microenvironment and immune periphery, we studied the immune composition of tumors isolated from mice treated with AB-837 monotherapy, compared to control group treated with isotype control in MC38OVAdim tumors.

### Material and Methods

### Mouse Antibodies and Recombinant Proteins

[0871] All mAbs and recombinant proteins were formulated in sterile PBS and were low in endotoxin (<0.05 EU/mg).

### Cell Culture

[0872] Nine days pre-inoculum, vials of MC38OVAdim cells were thawed into RPMI media containing 10% FBS, 1% Glutamax, 1% Sodium pyruvate, 1% HEPES, 1% NEAA, 0.01% 2-mercaptoethanol, 1% Penicillin-Streptomycin. Following centrifugation at 300×g for 8 min, cell pellet was resuspended, counted, and seeded in a T175 flask. On days −7, −5 and −2, the cells were detached and re-seeded at 6-8*10⁶ cells/T175 flask. On the day of inoculum, the cells were detached, centrifuged at 300×g for 10 min, filtered through 40 uM cell strainer and resuspended in RPMI.

### Inoculation of Mice

[0873] C57Bl/6 mice (female, 6-8 wk, Envigo) were anesthetized with 10% Ketamine and 10% Xylazine mixture injected intraperitoneal. Next, mice were inoculated with MC38OVAdim cells (1.2×10⁶) subcutaneously to the right flank in 50 μl/mice. Tumor growth was measured with an electronic caliper every 2-3 days and was reported as 0.5×W2×L mm³.

### Administration of Anti-mIL 18BP to Tumor-Bearing Mice

[0874] At tumor volume of ˜120 mm³ (day 9, mice were randomly assigned into treatment groups. Mice were treated with synagis mouse IgG1, k isotype control 15 mg/kg (IP), anti-mIL18 bp 837 mIgG1 15 mg/kg (IP). Treatments were inoculated twice a week for a total of 4 treatments. Tumor growth was measured with caliper every 2-3 days. Mice were weighed every week. Mice were bled before the 4^{th} treatment, 4 hours after the 4^{th} treatment, 24 and 48 hours after the 4^{th} treatment. Serum was analyzed for levels of IL-18 by ELISA (MBL Cat. No. 7625 and IL18 bp (in-house ELISA). Tumors were harvested from mice 24 hours after the 4^{th} treatment.

### Tumor Immune Phenotyping of MC38OVAdim Tumor Microenvironment

[0875] Mice were inoculated with MC38OVAdim and treated with anti-mouse IL-18BP Ab or isotype control twice a week. Tumors, spleens and serum were collected. Tumor samples were dissected into small pieces and transferred to GentleMACs™ C tubes (Miltenyi Biotec) containing an enzyme mix using human tumor Dissociation Kit (Miltenyi Biotec), as per the manufacturer's protocol. After dissociation, samples were centrifuged at 300 g for 8 minutes and supernatants were collected. Cells were filtered through a 70 μm filter. Single-cell suspensions were seeded into a 96-well V-bottomed plate. Cells were labeled for viability and dead cells were excluded using the Zombie Aqua viability dye (BioLegend). To block Fcγ receptors, cells were incubated with 10 μg/mL of anti-CD16 and anti-CD32 antibodies (BD Bioscience) in cold 1×PBS buffer for 10 minutes. Various immune populations were stained with anti-mouse antibodies (see Table 9). For cytokine staining, cells were stimulated with 50 ng/ml PMA, 1 μg/ml ionomycin and BFA. Then, cells were stained extracellularly for membrane markers and intracellularly for cytokine expression. Cells were acquired on FACS Fortessa cytometer (BD Bioscience). Analysis was done using FlowJo. Collected supernatants were centrifuged at 3130 g for 10 minutes. Following centrifugation, supernatants were recollected. Tumor supernatants and serum were analyzed for presence of IFNg by Cytometric Bead Array (CBA) Mouse Inflammation Kit (BD Cat. No. 552364).

TABLE 9
FACS staining panels to identify different immune cell
types for immune phenotyping in MC38ovadim tumor model.

| | Marker | Fluorophore | Vendor |
|---|---|---|---|
| Lymphoid | Live/dead | BV510 | |
| | CD45 | BV605 | Biolegend |
| | CD3 | BV421 | Biolegend |
| | CD4 | BV785 | Biolegend |
| | CD8 | PE-Cy7 | Biolegend |
| | CD19 | PercpCy5.5 | Biolegend |
| | NK1.1 | FITC | Biolegend |
| | CD44 | PE | Biolegend |
| | CD62L | APC | Biolegend |
| Myeloid | Live/dead | BV510 | |
| | CD45 (Rat IgG2b, κ) | BV605 | Biolegend |
| | CD11b(Rat IgG2b, κ) | PB | Biolegend |
| | Ly6C | APC-Cy7 | Biolegend |
| | Ly6G | BV785 | Biolegend |
| | F4/80 | AF488 | Bio-Rad |
| | CD11c | Percp-cy5.5 | Biolegend |
| | I-A/I-E | APC | Biolegend |
| | CD24 | AF700 | Biolegend |
| | CD103 | PE-cy7 | Biolegend |
| Cytokines | Live/dead | BV510 | |
| | CD45 | BV605 | Biolegend |
| | CD3 | BV421 | Biolegend |
| | CD4 | BUV395 | BD |
| | CD8 | BV785 | Biolegend |
| | CD49b | PerCP/Cy5.5 | Biolegend |
| | IFNg | AF488 | Biolegend |
| | TNFa | PE/cy7 | Biolegend |
| | IL2 | PE | Biolegend |

### Results:

[0876] When treating mice with anti-mouse IL18BP, a tumor growth inhibition of 41.1% was observed after 4 treatments (FIG. 74). To assess the immune composition, tumors and spleens were harvested as described in materials and methods, single cells suspensions were generated, and cells were stained with panels of antibodies as described in Table 9. Tumor supernatants and blood serum were collected and analyzed for cytokine concentrations. Monotherapy of anti-IL-18BP Ab resulted in increased numbers of CD3+ (+100%, p=0.007) and CD8+ (+85%, p=0.0087) T cells in the TME (FIG. 75A-C). This therapy also induced increased concentrations of IFNg⁺ (+76%, p=0.0519) in tumor supernatants (FIG. 75D). When inspecting activation markers, there was a significant increase in CD8+CD69+CD107+ (+168%, p=0.0005) T cells (FIG. 75E), as well as CD107+ (+54%, p=0.0094) NK cells (FIG. 75F). In the myeloid compartment, there was a significant increase in numbers of DC cells (+136%, p=0.0017, as well as in MHC-II (+40%, p=0.0138) expression on them (FIG. 75G), indicating on potentially increased capacity to prime T cells. When inspecting similar parameters in spleens or serum of AB-837-treated animals, no immune activation was observed. Only minor effects were detected—a slight decrease in NK cells, macrophages and neutrophiles, an increase in CD69 expression on NK cells, and a decrease in mIL18Ra expression on NK cells (FIG. 75H). IFNg was not detected in the serum of mice treated with anti-IL-18BP Ab or with isotype control (FIG. 75I). In summary, monotherapy with AB-837 induced robust TME-constrained immune modulation, without peripheral immune activation.

### Example 21: Efficacy of Anti IL-18BP Ab in Combination with Chemotherapy

### Methods

### Antibody and Oxaliplatin Administration

[0877] C57Bl/6 mice (female, 6-8 wk, Envigo), were subcutaneously inoculated with 1.2×10⁶ MC38OVAdim mouse tumor cells in 50 μl/mouse into the right flank. Tumor growth was measured with an electronic caliper every 2-3 days and was reported as 0.5×W2 XL mm³. The experimental endpoint is defined at tumor volume of 1800 mm³. Mice with body weight loss of above 10% between measurements, or 20% reduction from initial weight were excluded.

[0878] At a tumor volume of 110 mm³ mice were randomly assigned into two treatment groups: group administered with 5 mg/kg oxaliplatin (Sigma-Aldrich, Cat. 09512) or control group administered with DDW. When tumors reached volume of 140 mm³, mice in each group were assigned into two separate groups: group treated with 15 mg/kg anti-mouse IL18 bp antibody or isotype control. Antibodies were injected twice a week for a total of 6 treatments (see Table 10 for details).

TABLE 10
Experimental treatment groups

| | | | Oxaliplatin | |
|---|---|---|---|---|
| | | Ab Dose | dose | |
| Group | Ab | (mg/kg) | (mg/kg) | N |
| 1 | DDW + Synagis mIgG1 | 15 | 0 | 10 |
| 2 | DDW + anti-IL18bp mIgG1 | 15 | 0 | 10 |
| 3 | Oxaliplatin + Synagis mIgG1 | 15 | 5 | 10 |
| 4 | Oxaliplatin + anti-IL18bp | 15 | 5 | 10 |
| | mIgG1 | | | |

### Results

### Combination of Oxaliplatin and Anti-IL18BP Antibody Results in Synergistic Effects in MC38Ova Tumor Model

[0879] To study the effects of combining anti-IL18 bp mAb with oxaliplatin in MC38ovadim mouse tumor model mice were assigned to groups as described in table 10. As shown in FIG. 77, administration of combined therapy resulted in a synergistic anti-tumor responses compared to monotherapy with single agents. A combination therapy with oxaliplatin and anti-IL-18BP mAb resulted in 72% TGI (p<0.0001) compared to oxaliplatin monotherapy and 42% TGI (p=0.24) compared to anti-IL-18 bp mAb monotherapy.

[0880] The examples set forth above are provided to give those of ordinary skill in the art a complete disclosure and description of how to make and use the embodiments of the compositions, systems and methods of the invention, and are not intended to limit the scope of what the inventors regard as their invention. Modifications of the above-described modes for carrying out the invention that are obvious to persons of skill in the art are intended to be within the scope of the following claims. All patents and publications mentioned in the specification are indicative of the levels of skill of those skilled in the art to which the invention pertains.

[0881] All headings and section designations are used for clarity and reference purposes only and are not to be considered limiting in any way. For example, those of skill in the art will appreciate the usefulness of combining various aspects from different headings and sections as appropriate according to the spirit and scope of the invention described herein.

[0882] All references cited herein are hereby incorporated by reference herein in their entireties and for all purposes to the same extent as if each individual publication or patent or patent application was specifically and individually indicated to be incorporated by reference in its entirety for all purposes.

[0883] Many modifications and variations of this application can be made without departing from its spirit and scope, as will be apparent to those skilled in the art. The specific embodiments and examples described herein are offered by way of example only, and the application is to be limited only by the terms of the appended claims, along with the full scope of equivalents to which the claims are entitled.

The application's sequence listing, which the Patent Office published only in electronic form, follows.

SEQUENCE LISTING (1916 sequences)

SEQ ID NO: 1 - protein, 9 aa, synthetic construct
  REGION 1..9: note = synthetic
  VARIANT 4: note = X is N, R, D, G
  VARIANT 5: note = X is S, H, I or Q
  VARIANT 8: note = X is M or V
YTFXXYAXH

SEQ ID NO: 2 - protein, 17 aa, synthetic construct
  REGION 1..17: note = synthetic
  VARIANT 8: note = X is N, A or V
  VARIANT 10: note = X is K or L
WIHAGTGXTXYSQKFQG

SEQ ID NO: 3 - protein, 17 aa, synthetic construct
  REGION 1..17: note = synthetic
  VARIANT 6: note = X is S or E
ARGLGXVGPTGTSWFDP

SEQ ID NO: 4 - protein, 11 aa, synthetic construct
  REGION 1..11: note = synthetic
RASQGISSWLA

SEQ ID NO: 5 - protein, 7 aa, synthetic construct
  REGION 1..7: note = synthetic
EASSLES

SEQ ID NO: 6 - protein, 9 aa, synthetic construct
  REGION 1..9: note = synthetic
  VARIANT 5: note = X is S, V, Y, L or Q
  VARIANT 6: note = X is F, S or G
QQYRXXPFT

SEQ ID NO: 7 - protein, 9 aa, synthetic construct
  REGION 1..9: note = synthetic
  VARIANT 4: note = X is S or N
  VARIANT 5: note = X is E or S
  VARIANT 7: note = X is V or P
GTFXXYXIS

SEQ ID NO: 8 - protein, 17 aa, synthetic construct
  REGION 1..17: note = synthetic
  VARIANT 5: note = X is G or Y
  VARIANT 6: note = X is A or S
  VARIANT 10: note = X is N, I, or V
GIIPXXGTAXYAQKFQG

SEQ ID NO: 9 - protein, 9 aa, synthetic construct
  REGION 1..9: note = synthetic
  VARIANT 6: note = X is S, G or F
ARGRHXHET

SEQ ID NO: 10 - protein, 11 aa, synthetic construct
  REGION 1..11: note = synthetic
RASQGISSWLA

SEQ ID NO: 11 - protein, 7 aa, synthetic construct
  REGION 1..7: note = synthetic
AASSLQS

SEQ ID NO: 12 - protein, 9 aa, synthetic construct
  REGION 1..9: note = synthetic
  VARIANT 5: note = X is S or R
  VARIANT 6: note = X is L, I or F
QQVYXXPWT

SEQ ID NO: 13 - protein, 9 aa, synthetic construct
  REGION 1..9: note = synthetic
  VARIANT 4: note = X is G or D or S
  VARIANT 6: note = X is T or V or Y
FTFXNXAMS

SEQ ID NO: 14 - protein, 17 aa, synthetic construct
  REGION 1..17: note = synthetic
  VARIANT 4: note = X is G or A
  VARIANT 5: note = X is N or S
  VARIANT 6: note = X is A or G
AISXXXGSTYYADSVKG

SEQ ID NO: 15 - protein, 11 aa, synthetic construct
  REGION 1..11: note = synthetic
AKGPDRQVFDY

SEQ ID NO: 16 - protein, 11 aa, synthetic construct
  REGION 1..11: note = synthetic
  VARIANT 7: note = X is S or D
RASQGIXSWLA

SEQ ID NO: 17 - protein, 7 aa, synthetic construct
  REGION 1..7: note = synthetic
AASSLQS

SEQ ID NO: 18 - protein, 9 aa, synthetic construct
  REGION 1..9: note = synthetic
  VARIANT 4: note = X is Y or L
  VARIANT 5: note = X is S or F
QHAXXFPYT

SEQ ID NO: 19 - protein, 11 aa, synthetic construct
  REGION 1..11: note = synthetic
  VARIANT 6: note = X is S or P
  VARIANT 7: note = X is E or D
  VARIANT 9: note = X is G, Y, or P
GSISSXXYXWG

SEQ ID NO: 20 - protein, 16 aa, synthetic construct
  REGION 1..16: note = synthetic
  VARIANT 3: note = X is Y or V
  VARIANT 4: note = X is Y or N
  VARIANT 5: note = X is Q or S
  VARIANT 7: note = X is S or A
SIXXXGXTYYNPSLKS

SEQ ID NO: 21 - protein, 11 aa, synthetic construct
  REGION 1..11: note = synthetic
  VARIANT 5: note = X is Y or H
  VARIANT 8: note = X is V or L
ARGPXRQXFDY

SEQ ID NO: 22 - protein, 11 aa, synthetic construct
  REGION 1..11: note = synthetic
RASQGISSWLA

SEQ ID NO: 23 - protein, 7 aa, synthetic construct
  REGION 1..7: note = synthetic
AASSLQS

SEQ ID NO: 24 - protein, 9 aa, synthetic construct
  REGION 1..9: note = synthetic
  VARIANT 4: note = X is S or F
  VARIANT 5: note = X is S or V
QQGXXFPYT

SEQ ID NO: 25 - protein, 9 aa, synthetic construct
  REGION 1..9: note = synthetic
  VARIANT 4: note = X is any amino acid
  VARIANT 5: note = X is any amino acid
  VARIANT 8: note = X is any amino acid
YTFXXYAXH

SEQ ID NO: 26 - protein, 17 aa, synthetic construct
  REGION 1..17: note = synthetic
  VARIANT 8: note = X is any amino acid
  VARIANT 10: note = X is any amino acid
WIHAGTGXTXYSQKFQG

SEQ ID NO: 27 - protein, 17 aa, synthetic construct
  REGION 1..17: note = synthetic
  VARIANT 6: note = X is any amino acid
ARGLGXVGPTGTSWFDP

SEQ ID NO: 28 - protein, 11 aa, synthetic construct
  REGION 1..11: note = synthetic
RASQGISSWLA

SEQ ID NO: 29 - protein, 7 aa, synthetic construct
  REGION 1..7: note = sfynthetic
EASSLES

SEQ ID NO: 30 - protein, 9 aa, synthetic construct
  REGION 1..9: note = synthetic
  VARIANT 5: note = X is any amino acid
  VARIANT 6: note = X is any amino acid
QQYRXXPFT

SEQ ID NO: 31 - protein, 9 aa, synthetic construct
  REGION 1..9: note = synthetic
  VARIANT 4: note = X is any amino acid
  VARIANT 5: note = X is any amino acid
  VARIANT 7: note = X is any amino acid
GTFXXYXIS

SEQ ID NO: 32 - protein, 17 aa, synthetic construct
  REGION 1..17: note = synthetic
  VARIANT 6: note = X is any amino acid
  VARIANT 10: note = X is any amino acid
GIIPGXGTAXYAQKFQG

SEQ ID NO: 33 - protein, 9 aa, synthetic construct
  REGION 1..9: note = synthetic
  VARIANT 6: note = X is any amino acid
ARGRHXHET

SEQ ID NO: 34 - protein, 11 aa, synthetic construct
  REGION 1..11: note = synthetic
RASQGISSWLA

SEQ ID NO: 35 - protein, 7 aa, synthetic construct
  REGION 1..7: note = synthetic
AASSLQS

SEQ ID NO: 36 - protein, 9 aa, synthetic construct
  REGION 1..9: note = synthetic
  VARIANT 5: note = X is any amino acid
  VARIANT 6: note = X is any amino acid
QQVYXXPWT

SEQ ID NO: 37 - protein, 9 aa, synthetic construct
  REGION 1..9: note = synthetic
  VARIANT 4: note = X is any amino acid
  VARIANT 5: note = X is any amino acid
  SITE 6: note = misc_feature - Xaa can be any naturally occurring amino acid
FTFXNXAMS

SEQ ID NO: 38 - protein, 17 aa, synthetic construct
  REGION 1..17: note = synthetic
  VARIANT 4: note = X is any amino acid
  VARIANT 5: note = X is any amino acid
  VARIANT 6: note = X is any amino acid
AISXXXGSTYYADSVKG

SEQ ID NO: 39 - protein, 11 aa, synthetic construct
  REGION 1..11: note = synthetic
AKGPDRQVFDY

SEQ ID NO: 40 - protein, 11 aa, synthetic construct
  REGION 1..11: note = synthetic
  VARIANT 7: note = X is any amino acid
RASQGIXSWLA

SEQ ID NO: 41 - protein, 7 aa, synthetic construct
  REGION 1..7: note = synthetic
AASSLQS

SEQ ID NO: 42 - protein, 9 aa, synthetic construct
  REGION 1..9: note = synthetic
  VARIANT 4: note = X is any amino acid
  VARIANT 5: note = X is any amino acid
QHAXXFPYT

SEQ ID NO: 43 - protein, 11 aa, synthetic construct
  REGION 1..11: note = synthetic
  VARIANT 6: note = X is any amino acid
  VARIANT 7: note = X is any amino acid
  VARIANT 9: note = X is any amino acid
GSISSXXYXWG

SEQ ID NO: 44 - protein, 16 aa, synthetic construct
  REGION 1..16: note = synthetic
  VARIANT 3..5: note = X is any amino acid
  VARIANT 7: note = X is any amino acid
SIXXXGXTYYNPSLKS

SEQ ID NO: 45 - protein, 11 aa, synthetic construct
  REGION 1..11: note = synthetic
  VARIANT 5: note = X is any amino acid
  VARIANT 8: note = X is any amino acid
ARGPXRQXFDY

SEQ ID NO: 46 - protein, 11 aa, synthetic construct
  REGION 1..11: note = synthetic
RASQGISSWLA

SEQ ID NO: 47 - protein, 7 aa, synthetic construct
  REGION 1..7: note = synthetic
AASSLQS

SEQ ID NO: 48 - protein, 9 aa, synthetic construct
  REGION 1..9: note = synthetic
  VARIANT 4..5: note = X is any amino acid
QQGXXFPYT

SEQ ID NO: 49 - protein, 330 aa, synthetic construct [sequence omitted]

SEQ ID NO: 50 - protein, 326 aa, synthetic construct
  REGION 1..326: note = synthetic
ASTKGPSVFPLAPCSRSTSESTAALGCLVKDYFPEPVTVSWNSGALTSGVHTFPAVLQSSGLYSLSSVVTVPSSNFGTQTYTCNVDHKPSNTKVDKTVERKCCVECPPCPAPPVAGPSVFLFPPKPKDTLMISRTPEVTCVVVDVSHEDPEVQFNWYVDGVEVHNAKTKPREEQFNSTFRVVSVLTVVHQDWLNGKEYKCKVSNKGLPAPIEKTISKTKGQPREPQVYTLPPSREEMTKNQVSLTCLVKGFYPSDIAVEWESNGQPENNYKTTPPMLDSDGSFFLYSKLTVDKSRWQQGNVFSCSVMHEALHNHYTQKSLSLSPGK

SEQ ID NO: 51 - protein, 377 aa, synthetic construct
  REGION 1..377: note = synthetic
ASTKGPSVFPLAPCSRSTSGGTAALGCLVKDYFPEPVTVSWNSGALTSGVHTFPAVLQSSGLYSLSSVVTVPSSSLGTQTYTCNVNHKPSNTKVDKRVELKTPLGDTTHTCPRCPEPKSCDTPPPCPRCPEPKSCDTPPPCPRCPEPKSCDTPPPCPRCPAPELLGGPSVFLFPPKPKDTLMISRTPEVTCVVVDVSHEDPEVQFKWYVDGVEVHNAKTKPREEQYNSTFRVVSVLTVLHQDWLNGKEYKCKVSNKALPAPIEKTISKTKGQPREPQVYTLPPSREEMTKNQVSLTCLVKGFYPSDIAVEWESSGQPENNYNTTPPMLDSDGSFFLYSKLTVDKSRWQQGNIFSCSVMHEALHNRFTQKSLSLSPGK

SEQ ID NO: 52 - protein, 327 aa, synthetic construct
  REGION 1..327: note = synthetic
ASTKGPSVFPLAPCSRSTSESTAALGCLVKDYFPEPVTVSWNSGALTSGVHTFPAVLQSSGLYSLSSVVTVPSSSLGTKTYTCNVDHKPSNTKVDKRVESKYGPPCPSCPAPEFLGGPSVFLFPPKPKDTLMISRTPEVTCVVVDVSQEDPEVQFNWYVDGVEVHNAKTKPREEQFNSTYRVVSVLTVLHQDWLNGKEYKCKVSNKGLPSSIEKTISKAKGQPREPQVYTLPPSQEEMTKNQVSLTCLVKGFYPSDIAVEWESNGQPENNYKTTPPVLDSDGSFFLYSRLTVDKSRWQEGNVFSCSVMHEALHNHYTQKSLSLSLGK

SEQ ID NO: 53 - protein, 327 aa, synthetic construct
  REGION 1..327: note = synthetic
ASTKGPSVFPLAPCSRSTSESTAALGCLVKDYFPEPVTVSWNSGALTSGVHTFPAVLQSSGLYSLSSVVTVPSSSLGTKTYTCNVDHKPSNTKVDKRVESKYGPPCPPCPAPEFLGGPSVFLFPPKPKDTLMISRTPEVTCVVVDVSQEDPEVQFNWYVDGVEVHNAKTKPREEQFNSTYRVVSVLTVLHQDWLNGKEYKCKVSNKGLPSSIEKTISKAKGQPREPQVYTLPPSQEEMTKNQVSLTCLVKGFYPSDIAVEWESNGQPENNYKTTPPVLDSDGSFFLYSRLTVDKSRWQEGNVFSCSVMHEALHNHYTQKSLSLSPGK

SEQ ID NO: 54 - protein, 124 aa, synthetic construct
  REGION 1..124: note = synthetic
QVQLVQSGAEVKKPGASVKVSCEASGYTFDIYAVHWVRQAPGQRLEWMGWIHAGTGATKYSQKFQGRVTITRDTSASTAYMELSSLRSEDTAVYYCARGLGEVGPTGTSWFDPWGQGTLVTVSS

SEQ ID NO: 55 - protein, 9 aa, synthetic construct
  REGION 1..9: note = synthetic
YTFDIYAVH

SEQ ID NO: 56 - protein, 17 aa, synthetic construct
  REGION 1..17: note = synthetic
WIHAGTGATKYSQKFQG

SEQ ID NO: 57 - protein, 17 aa, synthetic construct
  REGION 1..17: note = synthetic
ARGLGEVGPTGTSWFDP

SEQ ID NO: 58 - protein, 450 aa, synthetic construct
  REGION 1..450: note = synthetic
QVQLVQSGAEVKKPGASVKVSCEASGYTFDIYAVHWVRQAPGQRLEWMGWIHAGTGATKYSQKFQGRVTITRDTSASTAYMELSSLRSEDTAVYYCARGLGEVGPTGTSWFDPWGQGTLVTVSSASTKGPSVFPLAPCSRSTSESTAALGCLVKDYFPEPVTVSWNSGALTSGVHTFPAVLQSSGLYSLSSVVTVPSSSLGTKTYTCNVDHKPSNTKVDKRVESKYGPPCPPCPAPEFLGGPSVFLFPPKPKDTLMISRTPEVTCVVVDVSQEDPEVQFNWYVDGVEVHNAKTKPREEQFNSTYRVVSVLTVLHQDWLNGKEYKCKVSNKGLPSSIEKTISKAKGQPREPQVYTLPPSQEEMTKNQVSLTCLVKGFYPSDIAVEWESNGQPENNYKTTPPVLDSDGSFFLYSRLTVDKSRWQEGNVFSCSVMHEALHNHYTQKSLSLSLG

SEQ ID NO: 59 - protein, 107 aa, synthetic construct
  REGION 1..107: note = synthetic
DIQMTQSPSTLSASVGDRVTITCRASQSISSWLAWYQQKPGKAPKLLIYEASSLESGVPLRFSGSGSGTEFTLTISSLQPDDFATYYCQQYRQSPFTFGGGTKVEIK

SEQ ID NO: 60 - protein, 11 aa, synthetic construct
  REGION 1..11: note = synthetic
RASQSISSWLA

SEQ ID NO: 61 - protein, 7 aa, synthetic construct
  REGION 1..7: note = synthetic
EASSLES

SEQ ID NO: 62 - protein, 9 aa, synthetic construct
  REGION 1..9: note = synthetic
QQYRQSPFT

SEQ ID NO: 63 - protein, 214 aa, synthetic construct
  REGION 1..214: note = synthetic
DIQMTQSPSTLSASVGDRVTITCRASQSISSWLAWYQQKPGKAPKLLIYEASSLESGVPLRFSGSGSGTEFTLTISSLQPDDFATYYCQQYRQSPFTFGGGTKVEIKRTVAAPSVFIFPPSDEQLKSGTASVVCLLNNFYPREAKVQWKVDNALQSGNSQESVTEQDSKDSTYSLSSTLTLSKADYEKHKVYACEVTHQGLSSPVTKSFNRGEC

SEQ ID NO: 64 - protein, 116 aa, synthetic construct
  REGION 1..116: note = synthetic
QVQLVQSGAEVKKPGSSVKVSCKASGGTFNSYVISWVRQAPGQGLEWMGGIIPGAGTANYAQKFQGRVTITADESTSTAYMELSSLRSEDTAVYYCARGRHSHETWGQGTLVTVSS

SEQ ID NO: 65 - protein, 9 aa, synthetic construct
  REGION 1..9: note = synthetic
GTFNSYVIS

SEQ ID NO: 66 - protein, 17 aa, synthetic construct
  REGION 1..17: note = synthetic
GIIPGAGTANYAQKFQG

SEQ ID NO: 67 - protein, 9 aa, synthetic construct
  REGION 1..9: note = synthetic
ARGRHSHET

SEQ ID NO: 68 - protein, 442 aa, synthetic construct
  REGION 1..442: note = synthetic
QVQLVQSGAEVKKPGSSVKVSCKASGGTFNSYVISWVRQAPGQGLEWMGGIIPGAGTANYAQKFQGRVTITADESTSTAYMELSSLRSEDTAVYYCARGRHSHETWGQGTLVTVSSASTKGPSVFPLAPCSRSTSESTAALGCLVKDYFPEPVTVSWNSGALTSGVHTFPAVLQSSGLYSLSSVVTVPSSSLGTKTYTCNVDHKPSNTKVDKRVESKYGPPCPPCPAPEFLGGPSVFLFPPKPKDTLMISRTPEVTCVVVDVSQEDPEVQFNWYVDGVEVHNAKTKPREEQFNSTYRVVSVLTVLHQDWLNGKEYKCKVSNKGLPSSIEKTISKAKGQPREPQVYTLPPSQEEMTKNQVSLTCLVKGFYPSDIAVEWESNGQPENNYKTTPPVLDSDGSFFLYSRLTVDKSRWQEGNVFSCSVMHEALHNHYTQKSLSLSLG

SEQ ID NO: 69 - protein, 107 aa, synthetic construct
  REGION 1..107: note = synthetic
DIQMTQSPSSVSASVGDRVTITCRASQGISSWLAWYQQKPGKAPKLLIYAASSLQSGVPSRFSGSGSGTDFTLTISSLQPEDFATYYCQQVYSLPWTFGGGTKVEIK

SEQ ID NO: 70 - protein, 11 aa, synthetic construct
  REGION 1..11: note = synthetic
RASQGISSWLA

SEQ ID NO: 71 - protein, 7 aa, synthetic construct
  REGION 1..7: note = synthetic
AASSLQS

SEQ ID NO: 72 - protein, 9 aa, synthetic construct
  REGION 1..9: note = synthetic
QQVYSLPWT

SEQ ID NO: 73 - protein, 214 aa, synthetic construct
  REGION 1..214: note = synthetic
DIQMTQSPSSVSASVGDRVTITCRASQGISSWLAWYQQKPGKAPKLLIYAASSLQSGVPSRFSGSGSGTDFTLTISSLQPEDFATYYCQQVYSLPWTFGGGTKVEIKRTVAAPSVFIFPPSDEQLKSGTASVVCLLNNFYPREAKVQWKVDNALQSGNSQESVTEQDSKDSTYSLSSTLTLSKADYEKHKVYACEVTHQGLSSPVTKSFNRGEC

SEQ ID NO: 74 - protein, 116 aa, synthetic construct
  REGION 1..116: note = synthetic
QVQLVQSGAEVKKPGSSVKVSCKASGGTFSEYVISWVRQAPGQGLEWMGGIIPGAGTANYAQKFQGRVTITADESTSTAYMELSSLRSEDTAVYYCARGRHSHETWGQGTLVTVSS

SEQ ID NO: 75 - protein, 9 aa, synthetic construct
  REGION 1..9: note = synthetic
GTFSEYVIS

SEQ ID NO: 76 - protein, 17 aa, synthetic construct
  REGION 1..17: note = synthetic
GIIPGAGTANYAQKFQG

SEQ ID NO: 77 - protein, 9 aa, synthetic construct
  REGION 1..9: note = synthetic
ARGRHSHET

SEQ ID NO: 78 - protein, 442 aa, synthetic construct
  REGION 1..442: note = synthetic
QVQLVQSGAEVKKPGSSVKVSCKASGGTFSEYVISWVRQAPGQGLEWMGGIIPGAGTANYAQKFQGRVTITADESTSTAYMELSSLRSEDTAVYYCARGRHSHETWGQGTLVTVSSASTKGPSVFPLAPCSRSTSESTAALGCLVKDYFPEPVTVSWNSGALTSGVHTFPAVLQSSGLYSLSSVVTVPSSSLGTKTYTCNVDHKPSNTKVDKRVESKYGPPCPPCPAPEFLGGPSVFLFPPKPKDTLMISRTPEVTCVVVDVSQEDPEVQFNWYVDGVEVHNAKTKPREEQFNSTYRVVSVLTVLHQDWLNGKEYKCKVSNKGLPSSIEKTISKAKGQPREPQVYTLPPSQEEMTKNQVSLTCLVKGFYPSDIAVEWESNGQPENNYKTTPPVLDSDGSFFLYSRLTVDKSRWQEGNVFSCSVMHEALHNHYTQKSLSLSLG

SEQ ID NO: 79 - protein, 107 aa, synthetic construct
  REGION 1..107: note = synthetic
DIQMTQSPSSVSASVGDRVTITCRASQGISSWLAWYQQKPGKAPKLLIYAASSLQSGVPSRFSGSGSGTDFTLTIGSLQPEDFATYYCQQVYSLPWTFGGGTKVEIK

SEQ ID NO: 80 - protein, 11 aa, synthetic construct
  REGION 1..11: note = synthetic
RASQGISSWLA

SEQ ID NO: 81 - protein, 7 aa, synthetic construct
  REGION 1..7: note = synthetic
AASSLQS

SEQ ID NO: 82 - protein, 9 aa, synthetic construct
  REGION 1..9: note = synthetic
QQVYSLPWT

SEQ ID NO: 83 - protein, 214 aa, synthetic construct
  REGION 1..214: note = synthetic
DIQMTQSPSSVSASVGDRVTITCRASQGISSWLAWYQQKPGKAPKLLIYAASSLQSGVPSRFSGSGSGTDFTLTIGSLQPEDFATYYCQQVYSLPWTFGGGTKVEIKRTVAAPSVFIFPPSDEQLKSGTASVVCLLNNFYPREAKVQWKVDNALQSGNSQESVTEQDSKDSTYSLSSTLTLSKADYEKHKVYACEVTHQGLSSPVTKSFNRGEC

SEQ ID NO: 84 - protein, 116 aa, synthetic construct
  REGION 1..116: note = synthetic
QVQLVQSGAEVKKPGSSVKVSCKASGGTFSEYPISWVRQAPGQGLEWMGGIIPGAGTAIYAQKFQGRVTITADESTSTAYMELSSLRSEDTAVYYCARGRHFHETWGQGTLVTVSS

SEQ ID NO: 85 - protein, 9 aa, synthetic construct
  REGION 1..9: note = synthetic
GTFSEYPIS

SEQ ID NO: 86 - protein, 17 aa, synthetic construct
  REGION 1..17: note = synthetic
GIIPGAGTAIYAQKFQG

SEQ ID NO: 87 - protein, 9 aa, synthetic construct
  REGION 1..9: note = synthetic
ARGRHFHET

SEQ ID NO: 88 - protein, 442 aa, synthetic construct
  REGION 1..442: note = synthetic
QVQLVQSGAEVKKPGSSVKVSCKASGGTFSEYPISWVRQAPGQGLEWMGGIIPGAGTAIYAQKFQGRVTITADESTSTAYMELSSLRSEDTAVYYCARGRHFHETWGQGTLVTVSSASTKGPSVFPLAPCSRSTSESTAALGCLVKDYFPEPVTVSWNSGALTSGVHTFPAVLQSSGLYSLSSVVTVPSSSLGTKTYTCNVDHKPSNTKVDKRVESKYGPPCPPCPAPEFLGGPSVFLFPPKPKDTLMISRTPEVTCVVVDVSQEDPEVQFNWYVDGVEVHNAKTKPREEQFNSTYRVVSVLTVLHQDWLNGKEYKCKVSNKGLPSSIEKTISKAKGQPREPQVYTLPPSQEEMTKNQVSLTCLVKGFYPSDIAVEWESNGQPENNYKTTPPVLDSDGSFFLYSRLTVDKSRWQEGNVFSCSVMHEALHNHYTQKSLSLSLG

SEQ ID NO: 89 - protein, 107 aa, synthetic construct
  REGION 1..107: note = synthetic
DIQMTQSPSSVSASVGDRVTITCRASQGISSWLAWYQQKPGKAPKLLIYAASSLQSGVPSRFSGSGSGTDFTLTISSLQPEDFATYYCQQVYRFPWTFGGGTKVEIK

SEQ ID NO: 90 - protein, 11 aa, synthetic construct
  REGION 1..11: note = synthetic
RASQGISSWLA

SEQ ID NO: 91 - protein, 7 aa, synthetic construct
  REGION 1..7: note = synthetic
AASSLQS

SEQ ID NO: 92 - protein, 9 aa, synthetic construct
  REGION 1..9: note = synthetic
QQVYRFPWT

SEQ ID NO: 93 - protein, 214 aa, synthetic construct
  REGION 1..214: note = synthetic
DIQMTQSPSSVSASVGDRVTITCRASQGISSWLAWYQQKPGKAPKLLIYAASSLQSGVPSRFSGSGSGTDFTLTISSLQPEDFATYYCQQVYRFPWTFGGGTKVEIKRTVAAPSVFIFPPSDEQLKSGTASVVCLLNNFYPREAKVQWKVDNALQSGNSQESVTEQDSKDSTYSLSSTLTLSKADYEKHKVYACEVTHQGLSSPVTKSFNRGEC

SEQ ID NO: 94 - protein, 124 aa, synthetic construct
  REGION 1..124: note = synthetic
QVQLVQSGAEVKKPGASVKVSCKASGYTFNSYAMHWVRQAPGQRLEWMGWIHAGTGNTKYSQKFQGRVTITRDTSASTAYMELSSLRSEDTAVYYCARGLGEVGPTGTSWFDPWGQGTLVTVSS

SEQ ID NO: 95 - protein, 9 aa, synthetic construct
  REGION 1..9: note = synthetic
YTFNSYAMH

SEQ ID NO: 96 - protein, 17 aa, synthetic construct
  REGION 1..17: note = synthetic
WIHAGTGNTKYSQKFQG

SEQ ID NO: 97 - protein, 17 aa, synthetic construct
  REGION 1..17: note = synthetic
ARGLGEVGPTGTSWFDP

SEQ ID NO: 98 - protein, 450 aa, synthetic construct
  REGION 1..450: note = synthetic
QVQLVQSGAEVKKPGASVKVSCKASGYTFNSYAMHWVRQAPGQRLEWMGWIHAGTGNTKYSQKFQGRVTITRDTSASTAYMELSSLRSEDTAVYYCARGLGEVGPTGTSWFDPWGQGTLVTVSSASTKGPSVFPLAPCSRSTSESTAALGCLVKDYFPEPVTVSWNSGALTSGVHTFPAVLQSSGLYSLSSVVTVPSSSLGTKTYTCNVDHKPSNTKVDKRVESKYGPPCPPCPAPEFLGGPSVFLFPPKPKDTLMISRTPEVTCVVVDVSQEDPEVQFNWYVDGVEVHNAKTKPREEQFNSTYRVVSVLTVLHQDWLNGKEYKCKVSNKGLPSSIEKTISKAKGQPREPQVYTLPPSQEEMTKNQVSLTCLVKGFYPSDIAVEWESNGQPENNYKTTPPVLDSDGSFFLYSRLTVDKSRWQEGNVFSCSVMHEALHNHYTQKSLSLSLG

SEQ ID NO: 99 - protein, 107 aa, synthetic construct
  REGION 1..107: note = synthetic
DIQMTQSPPTLSASVGDRVTITCRASQSISSWLAWYQQKPGKAPKLLIYEASSLESGVPSRFSGSGSGTEFTLTISSLQPDDFATYYCQQYRVFPFTFGGGTKVEIK

SEQ ID NO: 100 - protein, 11 aa, synthetic construct
  REGION 1..11: note = synthetic
RASQSISSWLA

SEQ ID NO: 101 - protein, 7 aa, synthetic construct
  REGION 1..7: note = synthetic
EASSLES

SEQ ID NO: 102 - protein, 9 aa, synthetic construct
  REGION 1..9: note = synthetic
QQYRVFPFT

SEQ ID NO: 103 - protein, 214 aa, synthetic construct
  REGION 1..214: note = synthetic
DIQMTQSPPTLSASVGDRVTITCRASQSISSWLAWYQQKPGKAPKLLIYEASSLESGVPSRFSGSGSGTEFTLTISSLQPDDFATYYCQQYRVFPFTFGGGTKVEIKRTVAAPSVFIFPPSDEQLKSGTASVVCLLNNFYPREAKVQWKVDNALQSGNSQESVTEQDSKDSTYSLSSTLTLSKADYEKHKVYACEVTHQGLSSPVTKSFNRGEC

SEQ ID NO: 104 - protein, 118 aa, synthetic construct
  REGION 1..118: note = synthetic
EVQLLESGGGLVQPGGSLRLSCAASGFTFGNTAMSWVRQAPGKGLEWVSAISANAGSTYYADSVKGRFTISRDNSKNTLYLQMNSLRAEDTAVYYCAKGPDRQVFDYWGQGTLVTVSS

SEQ ID NO: 105 - protein, 9 aa, synthetic construct
  REGION 1..9: note = synthetic
FTFGNTAMS

SEQ ID NO: 106 - protein, 17 aa, synthetic construct
  REGION 1..17: note = synthetic
AISANAGSTYYADSVKG

SEQ ID NO: 107 - protein, 11 aa, synthetic construct
  REGION 1..11: note = synthetic
AKGPDRQVFDY

SEQ ID NO: 108 - protein, 444 aa, synthetic construct
  REGION 1..444: note = synthetic
EVQLLESGGGLVQPGGSLRLSCAASGFTFGNTAMSWVRQAPGKGLEWVSAISANAGSTYYADSVKGRFTISRDNSKNTLYLQMNSLRAEDTAVYYCAKGPDRQVFDYWGQGTLVTVSSASTKGPSVFPLAPCSRSTSESTAALGCLVKDYFPEPVTVSWNSGALTSGVHTFPAVLQSSGLYSLSSVVTVPSSSLGTKTYTCNVDHKPSNTKVDKRVESKYGPPCPPCPAPEFLGGPSVFLFPPKPKDTLMISRTPEVTCVVVDVSQEDPEVQFNWYVDGVEVHNAKTKPREEQFNSTYRVVSVLTVLHQDWLNGKEYKCKVSNKGLPSSIEKTISKAKGQPREPQVYTLPPSQEEMTKNQVSLTCLVKGFYPSDIAVEWESNGQPENNYKTTPPVLDSDGSFFLYSRLTVDKSRWQEGNVFSCSVMHEALHNHYTQKSLSLSLG

SEQ ID NO: 109 - protein, 107 aa, synthetic construct
  REGION 1..107: note = synthetic
DIQMTQSPSSVSASVGDRVTITCRASQGISSWLAWYQQKPGKAPKLLIYAASSLQSGVPSRFSGSGSGTDFTLTISSLQPEDFATYYCQHALFFPYTFGGGTKVEIK

SEQ ID NO: 110 - protein, 11 aa, synthetic construct
  REGION 1..11: note = synthetic
RASQGISSWLA

SEQ ID NO: 111 - protein, 7 aa, synthetic construct
  REGION 1..7: note = synthetic
AASSLQS

SEQ ID NO: 112 - protein, 9 aa, synthetic construct
  REGION 1..9: note = synthetic
QHALFFPYT

SEQ ID NO: 113 - protein, 214 aa, synthetic construct
  REGION 1..214: note = synthetic
DIQMTQSPSSVSASVGDRVTITCRASQGISSWLAWYQQKPGKAPKLLIYAASSLQSGVPSRFSGSGSGTDFTLTISSLQPEDFATYYCQHALFFPYTFGGGTKVEIKRTVAAPSVFIFPPSDEQLKSGTASVVCLLNNFYPREAKVQWKVDNALQSGNSQESVTEQDSKDSTYSLSSTLTLSKADYEKHKVYACEVTHQGLSSPVTKSFNRGEC

SEQ ID NO: 114 - protein, 118 aa, synthetic construct
  REGION 1..118: note = synthetic
EVQLLESGGGLVQPGGSLRLSCAASGFTFDNVAMSWVRQAPGKGLEWVSAISGNAGSTYYADSVKGRFTISRDNSKNTLHLQMNSLRAEDTAVYYCAKGPDRQVFDYWGQGTLVTVSS

SEQ ID NO: 115 - protein, 9 aa, synthetic construct
  REGION 1..9: note = synthetic
FTFDNVAMS

SEQ ID NO: 116 - protein, 17 aa, synthetic construct
  REGION 1..17: note = synthetic
AISGNAGSTYYADSVKG

SEQ ID NO: 117 - protein, 11 aa, synthetic construct
  REGION 1..11: note = synthetic
AKGPDRQVFDY

SEQ ID NO: 118 - protein, 444 aa, synthetic construct
  REGION 1..444: note = synthetic
EVQLLESGGGLVQPGGSLRLSCAASGFTFDNVAMSWVRQAPGKGLEWVSAISGNAGSTYYADSVKGRFTISRDNSKNTLHLQMNSLRAEDTAVYYCAKGPDRQVFDYWGQGTLVTVSSASTKGPSVFPLAPCSRSTSESTAALGCLVKDYFPEPVTVSWNSGALTSGVHTFPAVLQSSGLYSLSSVVTVPSSSLGTKTYTCNVDHKPSNTKVDKRVESKYGPPCPPCPAPEFLGGPSVFLFPPKPKDTLMISRTPEVTCVVVDVSQEDPEVQFNWYVDGVEVHNAKTKPREEQFNSTYRVVSVLTVLHQDWLNGKEYKCKVSNKGLPSSIEKTISKAKGQPREPQVYTLPPSQEEMTKNQVSLTCLVKGFYPSDIAVEWESNGQPENNYKTTPPVLDSDGSFFLYSRLTVDKSRWQEGNVFSCSVMHEALHNHYTQKSLSLSLG

SEQ ID NO: 119 - protein, 107 aa, synthetic construct
  REGION 1..107: note = synthetic
DIQMTQSPSSVSASVGDRVTITCRASQGISSWLAWYQQKPGKAPKLLIYAASSLQSGVPSRFSGSGSGTDFTLTISSLQPEDFATYYCQHAYSFPYTFGGGTKVEIK

SEQ ID NO: 120 - protein, 11 aa, synthetic construct
  REGION 1..11: note = synthetic
RASQGISSWLA

SEQ ID NO: 121 - protein, 7 aa, synthetic construct
  REGION 1..7: note = synthetic
AASSLQS

SEQ ID NO: 122 - protein, 9 aa, synthetic construct
  REGION 1..9: note = synthetic
QHAYSFPYT

SEQ ID NO: 123 - protein, 214 aa, synthetic construct
  REGION 1..214: note = synthetic
DIQMTQSPSSVSASVGDRVTITCRASQGISSWLAWYQQKPGKAPKLLIYAASSLQSGVPSRFSGSGSGTDFTLTISSLQPEDFATYYCQHAYSFPYTFGGGTKVEIKRTVAAPSVFIFPPSDEQLKSGTASVVCLLNNFYPREAKVQWKVDNALQSGNSQESVTEQDSKDSTYSLSSTLTLSKADYEKHKVYACEVTHQGLSSPVTKSFNRGEC

SEQ ID NO: 124 - protein, 118 aa, synthetic construct
  REGION 1..118: note = synthetic
EVQLLESGGGLVQPGGSLRLSCAASGFTFSNYAMSWVRQAPGKGLEWVSAISGSGGSTYYADSVKGRFTISRDNSKNTLYLQMNSLRAEDTAVYYCAKGPDRQVFDYWGQGTLVTVSS

SEQ ID NO: 125 - protein, 9 aa, synthetic construct
  REGION 1..9: note = synthetic
FTFSNYAMS

SEQ ID NO: 126 - protein, 17 aa, synthetic construct
  REGION 1..17: note = synthetic
AISGSGGSTYYADSVKG

SEQ ID NO: 127 - protein, 11 aa, synthetic construct
  REGION 1..11: note = synthetic
AKGPDRQVFDY

SEQ ID NO: 128 - protein, 444 aa, synthetic construct
  REGION 1..444: note = synthetic
EVQLLESGGGLVQPGGSLRLSCAASGFTFSNYAMSWVRQAPGKGLEWVSAISGSGGSTYYADSVKGRFTISRDNSKNTLYLQMNSLRAEDTAVYYCAKGPDRQVFDYWGQGTLVTVSSASTKGPSVFPLAPCSRSTSESTAALGCLVKDYFPEPVTVSWNSGALTSGVHTFPAVLQSSGLYSLSSVVTVPSSSLGTKTYTCNVDHKPSNTKVDKRVESKYGPPCPPCPAPEFLGGPSVFLFPPKPKDTLMISRTPEVTCVVVDVSQEDPEVQFNWYVDGVEVHNAKTKPREEQFNSTYRVVSVLTVLHQDWLNGKEYKCKVSNKGLPSSIEKTISKAKGQPREPQVYTLPPSQEEMTKNQVSLTCLVKGFYPSDIAVEWESNGQPENNYKTTPPVLDSDGSFFLYSRLTVDKSRWQEGNVFSCSVMHEALHNHYTQKSLSLSLG

SEQ ID NO: 129 - protein, 107 aa, synthetic construct
  REGION 1..107: note = synthetic
DIQMTQSPSSVSASVGDRVTITCRASQGIDSWLAWYQQKPGKAPKLLIYAASSLQSGVPSRFSGSGSGTDFTLTISSLQPEDFATYYCQHAYSFPYTFGGGTKVEIK

SEQ ID NO: 130 - protein, 11 aa, synthetic construct
  REGION 1..11: note = synthetic
RASQGIDSWLA

SEQ ID NO: 131 - protein, 7 aa, synthetic construct
  REGION 1..7: note = synthetic
AASSLQS

SEQ ID NO: 132 - protein, 9 aa, synthetic construct
  REGION 1..9: note = synthetic
QHAYSFPYT

SEQ ID NO: 133 - protein, 214 aa, synthetic construct
  REGION 1..214: note = synthetic
DIQMTQSPSSVSASVGDRVTITCRASQGIDSWLAWYQQKPGKAPKLLIYAASSLQSGVPSRFSGSGSGTDFTLTISSLQPEDFATYYCQHAYSFPYTFGGGTKVEIKRTVAAPSVFIFPPSDEQLKSGTASVVCLLNNFYPREAKVQWKVDNALQSGNSQESVTEQDSKDSTYSLSSTLTLSKADYEKHKVYACEVTHQGLSSPVTKSFNRGEC

SEQ ID NO: 134 - protein, 124 aa, synthetic construct
  REGION 1..124: note = synthetic
QVQLVQSGAEVKKPGASVKVSCKASGYTFGIYAMHWVRQAPGQRLEWMGWIHAGTGVTKYSQKFQGRVTITRDTSASTAYMELSSLRSEDTAVYYCARGLGEVGPTGTSWFDPWGQGTLVTVSS

SEQ ID NO: 135 - protein, 9 aa, synthetic construct
  REGION 1..9: note = synthetic
YTFGIYAMH

SEQ ID NO: 136 - protein, 17 aa, synthetic construct
  REGION 1..17: note = synthetic
WIHAGTGVTKYSQKFQG

SEQ ID NO: 137 - protein, 17 aa, synthetic construct
  REGION 1..17: note = synthetic
ARGLGEVGPTGTSWFDP

SEQ ID NO: 138 - protein, 450 aa, synthetic construct
  REGION 1..450: note = synthetic
QVQLVQSGAEVKKPGASVKVSCKASGYTFGIYAMHWVRQAPGQRLEWMGWIHAGTGVTKYSQKFQGRVTITRDTSASTAYMELSSLRSEDTAVYYCARGLGEVGPTGTSWFDPWGQGTLVTVSSASTKGPSVFPLAPCSRSTSESTAALGCLVKDYFPEPVTVSWNSGALTSGVHTFPAVLQSSGLYSLSSVVTVPSSSLGTKTYTCNVDHKPSNTKVDKRVESKYGPPCPPCPAPEFLGGPSVFLFPPKPKDTLMISRTPEVTCVVVDVSQEDPEVQFNWYVDGVEVHNAKTKPREEQFNSTYRVVSVLTVLHQDWLNGKEYKCKVSNKGLPSSIEKTISKAKGQPREPQVYTLPPSQEEMTKNQVSLTCLVKGFYPSDIAVEWESNGQPENNYKTTPPVLDSDGSFFLYSRLTVDKSRWQEGNVFSCSVMHEALHNHYTQKSLSLSLG

SEQ ID NO: 139 - protein, 107 aa, synthetic construct
  REGION 1..107: note = synthetic
DIQMTQSPSTLSASVGDRVTITCRASQSISSWLAWYQQKPGKAPKLLIYEASSLESGVPSRFSGSGSGTEFTLTISSLQPDDFATYYCQQYRYSPFTFGGGTKVEIK

SEQ ID NO: 140 - protein, 11 aa, synthetic construct
  REGION 1..11: note = synthetic
RASQSISSWLA

SEQ ID NO: 141 - protein, 7 aa, synthetic construct
  REGION 1..7: note = synthetic
EASSLES

SEQ ID NO: 142 - protein, 9 aa, synthetic construct
  REGION 1..9: note = synthetic
QQYRYSPFT

SEQ ID NO: 143 - protein, 214 aa, synthetic construct
  REGION 1..214: note = synthetic
DIQMTQSPSTLSASVGDRVTITCRASQSISSWLAWYQQKPGKAPKLLIYEASSLESGVPSRFSGSGSGTEFTLTISSLQPDDFATYYCQQYRYSPFTFGGGTKVEIKRTVAAPSVFIFPPSDEQLKSGTASVVCLLNNFYPREAKVQWKVDNALQSGNSQESVTEQDSKDSTYSLSSTLTLSKADYEKHKVYACEVTHQGLSSPVTKSFNRGEC

SEQ ID NO: 144 - protein, 124 aa, synthetic construct
  REGION 1..124: note = synthetic
QVQLVQSGAEVKKPGASVKVSCKASGYTFKQYAMHWVRQAPGQRLEWMGWIHAGTGNTKYSQKFQGRVTITRDTSASTAYMELSSLRSEDTAVYYCARGLGSVGPTGTSWFDPWGQGTLVTVSS

SEQ ID NO: 145 - protein, 9 aa, synthetic construct
  REGION 1..9: note = synthetic
YTFKQYAMH

SEQ ID NO: 146 - protein, 17 aa, synthetic construct
  REGION 1..17: note = sfynthetic
WIHAGTGNTKYSQKFQG

SEQ ID NO: 147 - protein, 17 aa, synthetic construct
  REGION 1..17: note = synthetic
ARGLGSVGPTGTSWFDP

SEQ ID NO: 148 - protein, 450 aa, synthetic construct
  REGION 1..450: note = synthetic
QVQLVQSGAEVKKPGASVKVSCKASGYTFKQYAMHWVRQAPGQRLEWMGWIHAGTGNTKYSQKFQGRVTITRDTSASTAYMELSSLRSEDTAVYYCARGLGSVGPTGTSWFDPWGQGTLVTVSSASTKGPSVFPLAPCSRSTSESTAALGCLVKDYFPEPVTVSWNSGALTSGVHTFPAVLQSSGLYSLSSVVTVPSSSLGTKTYTCNVDHKPSNTKVDKRVESKYGPPCPPCPAPEFLGGPSVFLFPPKPKDTLMISRTPEVTCVVVDVSQEDPEVQFNWYVDGVEVHNAKTKPREEQFNSTYRVVSVLTVLHQDWLNGKEYKCKVSNKGLPSSIEKTISKAKGQPREPQVYTLPPSQEEMTKNQVSLTCLVKGFYPSDIAVEWESNGQPENNYKTTPPVLDSDGSFFLYSRLTVDKSRWQEGNVFSCSVMHEALHNHYTQKSLSLSLG

SEQ ID NO: 149 - protein, 107 aa, synthetic construct
  REGION 1..107: note = synthetic
DIQMTQSPSTLSASVGDRVTITCRASQSISSWLAWYQQKPGKAPKLLIYEASSLESGVPSRFSGSGSGTEFTLTISSLQPDDFATYYCQQYRSGPFTFGGGTKVEIK

SEQ ID NO: 150 - protein, 11 aa, synthetic construct
  REGION 1..11: note = synthetic
RASQSISSWLA

SEQ ID NO: 151 - protein, 7 aa, synthetic construct
  REGION 1..7: note = synthetic
EASSLES

SEQ ID NO: 152 - protein, 9 aa, synthetic construct
  REGION 1..9: note = synthetic
QQYRSGPFT

SEQ ID NO: 153 - protein, 214 aa, synthetic construct
  REGION 1..214: note = synthetic
DIQMTQSPSTLSASVGDRVTITCRASQSISSWLAWYQQKPGKAPKLLIYEASSLESGVPSRFSGSGSGTEFTLTISSLQPDDFATYYCQQYRSGPFTFGGGTKVEIKRTVAAPSVFIFPPSDEQLKSGTASVVCLLNNFYPREAKVQWKVDNALQSGNSQESVTEQDSKDSTYSLSSTLTLSKADYEKHKVYACEVTHQGLSSPVTKSFNRGEC

SEQ ID NO: 154 - protein, 119 aa, synthetic construct
  REGION 1..119: note = synthetic
QLQLQESGPGLVKPSETLSLTCTVSGGSISSPDYPWGWIRQPPGKGLEWIGSIYYQGATYYNPSLKSRVTISVDTSKNQFSLKLSSVTAADTAVYYCARGPYRQLFDYWGQGTLVTVSS

SEQ ID NO: 155 - protein, 11 aa, synthetic construct
  REGION 1..11: note = synthetic
GSISSPDYPWG

SEQ ID NO: 156 - protein, 16 aa, synthetic construct
  REGION 1..16: note = synthetic
SIYYQGATYYNPSLKS

SEQ ID NO: 157 - protein, 11 aa, synthetic construct
  REGION 1..11: note = synthetic
ARGPYRQLFDY

SEQ ID NO: 158 - protein, 445 aa, synthetic construct
  REGION 1..445: note = synthetic
QLQLQESGPGLVKPSETLSLTCTVSGGSISSPDYPWGWIRQPPGKGLEWIGSIYYQGATYYNPSLKSRVTISVDTSKNQFSLKLSSVTAADTAVYYCARGPYRQLFDYWGQGTLVTVSSASTKGPSVFPLAPCSRSTSESTAALGCLVKDYFPEPVTVSWNSGALTSGVHTFPAVLQSSGLYSLSSVVTVPSSSLGTKTYTCNVDHKPSNTKVDKRVESKYGPPCPPCPAPEFLGGPSVFLFPPKPKDTLMISRTPEVTCVVVDVSQEDPEVQFNWYVDGVEVHNAKTKPREEQFNSTYRVVSVLTVLHQDWLNGKEYKCKVSNKGLPSSIEKTISKAKGQPREPQVYTLPPSQEEMTKNQVSLTCLVKGFYPSDIAVEWESNGQPENNYKTTPPVLDSDGSFFLYSRLTVDKSRWQEGNVFSCSVMHEALHNHYTQKSLSLSLG

SEQ ID NO: 159 - protein, 107 aa, synthetic construct
  REGION 1..107: note = synthetic
DIQMTQSPSSVSASVGDRVTITCRASQGISSWLAWYQQKPGKAPKLLIYAASSLQSGVPSRFSGSGSGTDFTLTISSLQPEDFATYYCQQGSVFPYTFGGGTKVEIK

SEQ ID NO: 160 - protein, 11 aa, synthetic construct
  REGION 1..11: note = synthetic
RASQGISSWLA

SEQ ID NO: 161 - protein, 7 aa, synthetic construct
  REGION 1..7: note = synthetic
AASSLQS

SEQ ID NO: 162 - protein, 9 aa, synthetic construct
  REGION 1..9: note = synthetic
QQGSVFPYT

SEQ ID NO: 163 - protein, 214 aa, synthetic construct
  REGION 1..214: note = synthetic
DIQMTQSPSSVSASVGDRVTITCRASQGISSWLAWYQQKPGKAPKLLIYAASSLQSGVPSRFSGSGSGTDFTLTISSLQPEDFATYYCQQGSVFPYTFGGGTKVEIKRTVAAPSVFIFPPSDEQLKSGTASVVCLLNNFYPREAKVQWKVDNALQSGNSQESVTEQDSKDSTYSLSSTLTLSKADYEKHKVYACEVTHQGLSSPVTKSFNRGEC

SEQ ID NO: 164 - protein, 119 aa, synthetic construct
  REGION 1..119: note = synthetic
QLQLQESGPGLVKPSETLSLTCTVSGGSISSSEYGWGWIRQPPGKGLEWIGSIVNSGSTYYNPSLKSRVTISVDTSKNQFSLKLSSVTAADTAVYYCARGPHRQVFDYWGQGTLVTVSS

SEQ ID NO: 165 - protein, 11 aa, synthetic construct
  REGION 1..11: note = synthetic
GSISSSEYGWG

SEQ ID NO: 166 - protein, 16 aa, synthetic construct
  REGION 1..16: note = synthetic
SIVNSGSTYYNPSLKS

SEQ ID NO: 167 - protein, 11 aa, synthetic construct
  REGION 1..11: note = synthetic
ARGPHRQVFDY

SEQ ID NO: 168 - protein, 445 aa, synthetic construct
  REGION 1..445: note = synthetic
QLQLQESGPGLVKPSETLSLTCTVSGGSISSSEYGWGWIRQPPGKGLEWIGSIVNSGSTYYNPSLKSRVTISVDTSKNQFSLKLSSVTAADTAVYYCARGPHRQVFDYWGQGTLVTVSSASTKGPSVFPLAPCSRSTSESTAALGCLVKDYFPEPVTVSWNSGALTSGVHTFPAVLQSSGLYSLSSVVTVPSSSLGTKTYTCNVDHKPSNTKVDKRVESKYGPPCPPCPAPEFLGGPSVFLFPPKPKDTLMISRTPEVTCVVVDVSQEDPEVQFNWYVDGVEVHNAKTKPREEQFNSTYRVVSVLTVLHQDWLNGKEYKCKVSNKGLPSSIEKTISKAKGQPREPQVYTLPPSQEEMTKNQVSLTCLVKGFYPSDIAVEWESNGQPENNYKTTPPVLDSDGSFFLYSRLTVDKSRWQEGNVFSCSVMHEALHNHYTQKSLSLSLG

SEQ ID NO: 169 - protein, 107 aa, synthetic construct
  REGION 1..107: note = synthetic
DIQMTQSPSSVSASVGDRVTITCRASQGISSWLAWYQQKPGKAPKHLIYAASSLQSGVPSRFSGSGSGTDFTLTISSLQPEDFATYYCQQGFSFPYTFGGGTKVEIK

SEQ ID NO: 170 - protein, 11 aa, synthetic construct
  REGION 1..11: note = synthetic
RASQGISSWLA

SEQ ID NO: 171 - protein, 7 aa, synthetic construct
  REGION 1..7: note = synthetic
AASSLQS

SEQ ID NO: 172 - protein, 9 aa, synthetic construct
  REGION 1..9: note = synthetic
QQGFSFPYT

SEQ ID NO: 173 - protein, 214 aa, synthetic construct
  REGION 1..214: note = 174
DIQMTQSPSSVSASVGDRVTITCRASQGISSWLAWYQQKPGKAPKHLIYAASSLQSGVPSRFSGSGSGTDFTLTISSLQPEDFATYYCQQGFSFPYTFGGGTKVEIKRTVAAPSVFIFPPSDEQLKSGTASVVCLLNNFYPREAKVQWKVDNALQSGNSQESVTEQDSKDSTYSLSSTLTLSKADYEKHKVYACEVTHQGLSSPVTKSFNRGEC

SEQ ID NO: 174 - protein, 124 aa, synthetic construct
  REGION 1..124: note = synthetic
QVQLVQSGAEVKKPGASVKVSCKASGYTFRHYAMHWVRQAPGQRLEWMGWIHAGTGNTLYSQKFQGRVTITRDTSASTAYMELSSLRSEDTAVYYCARGLGEVGPTGTSWFDPWGQGTLVTVSS

SEQ ID NO: 175 - protein, 9 aa, synthetic construct
  REGION 1..9: note = synthetic
YTFRHYAMH

SEQ ID NO: 176 - protein, 17 aa, synthetic construct
  REGION 1..17: note = synthetic
WIHAGTGNTLYSQKFQG

SEQ ID NO: 177 - protein, 17 aa, synthetic construct
  REGION 1..17: note = synthetic
ARGLGEVGPTGTSWFDP

SEQ ID NO: 178 - protein, 450 aa, synthetic construct
  REGION 1..450: note = synthetic
QVQLVQSGAEVKKPGASVKVSCKASGYTFRHYAMHWVRQAPGQRLEWMGWIHAGTGNTLYSQKFQGRVTITRDTSASTAYMELSSLRSEDTAVYYCARGLGEVGPTGTSWFDPWGQGTLVTVSSASTKGPSVFPLAPCSRSTSESTAALGCLVKDYFPEPVTVSWNSGALTSGVHTFPAVLQSSGLYSLSSVVTVPSSSLGTKTYTCNVDHKPSNTKVDKRVESKYGPPCPPCPAPEFLGGPSVFLFPPKPKDTLMISRTPEVTCVVVDVSQEDPEVQFNWYVDGVEVHNAKTKPREEQFNSTYRVVSVLTVLHQDWLNGKEYKCKVSNKGLPSSIEKTISKAKGQPREPQVYTLPPSQEEMTKNQVSLTCLVKGFYPSDIAVEWESNGQPENNYKTTPPVLDSDGSFFLYSRLTVDKSRWQEGNVFSCSVMHEALHNHYTQKSLSLSLG

SEQ ID NO: 179 - protein, 107 aa, synthetic construct
  REGION 1..107: note = synthetic
DIQMTQSPSTLSASVGDRVTITCRASQSISSWLAWYQQKPGKAPKLLIYEASSLESGVPSRFSGSGSGTEFTLTISSLQPDDFATYYCQQYRLGPFTFGGGTKVEIK

SEQ ID NO: 180 - protein, 11 aa, synthetic construct
  REGION 1..11: note = synthetic
RASQSISSWLA

SEQ ID NO: 181 - protein, 7 aa, synthetic construct
  REGION 1..7: note = synthetic
EASSLES

SEQ ID NO: 182 - protein, 9 aa, synthetic construct
  REGION 1..9: note = synthetic
QQYRLGPFT

SEQ ID NO: 183 - protein, 214 aa, synthetic construct
  REGION 1..214: note = synthetic
DIQMTQSPSTLSASVGDRVTITCRASQSISSWLAWYQQKPGKAPKLLIYEASSLESGVPSRFSGSGSGTEFTLTISSLQPDDFATYYCQQYRLGPFTFGGGTKVEIKRTVAAPSVFIFPPSDEQLKSGTASVVCLLNNFYPREAKVQWKVDNALQSGNSQESVTEQDSKDSTYSLSSTLTLSKADYEKHKVYACEVTHQGLSSPVTKSFNRGEC

SEQ ID NO: 184 - protein, 119 aa, synthetic construct
  REGION 1..119: note = synthetic
QLQLQESGPGLVKPSETLSLTCTVSGGSISSSDYYWGWIRQPPGKGLEWIGSIYYSGSTYYNPSLKSRVTISVDTSKNQFSLKLSSVTAADTAVYYCARGPHRQVFDYWGQGTLVTVSS

SEQ ID NO: 185 - protein, 11 aa, synthetic construct
  REGION 1..11: note = synthetic
GSISSSDYYWG

SEQ ID NO: 186 - protein, 16 aa, synthetic construct
  REGION 1..16: note = synthetic
SIYYSGSTYYNPSLKS

SEQ ID NO: 187 - protein, 11 aa, synthetic construct
  REGION 1..11: note = synthetic
ARGPHRQVFDY

SEQ ID NO: 188 - protein, 445 aa, synthetic construct
  REGION 1..445: note = synthetic
QLQLQESGPGLVKPSETLSLTCTVSGGSISSSDYYWGWIRQPPGKGLEWIGSIYYSGSTYYNPSLKSRVTISVDTSKNQFSLKLSSVTAADTAVYYCARGPHRQVFDYWGQGTLVTVSSASTKGPSVFPLAPCSRSTSESTAALGCLVKDYFPEPVTVSWNSGALTSGVHTFPAVLQSSGLYSLSSVVTVPSSSLGTKTYTCNVDHKPSNTKVDKRVESKYGPPCPPCPAPEFLGGPSVFLFPPKPKDTLMISRTPEVTCVVVDVSQEDPEVQFNWYVDGVEVHNAKTKPREEQFNSTYRVVSVLTVLHQDWLNGKEYKCKVSNKGLPSSIEKTISKAKGQPREPQVYTLPPSQEEMTKNQVSLTCLVKGFYPSDIAVEWESNGQPENNYKTTPPVLDSDGSFFLYSRLTVDKSRWQEGNVFSCSVMHEALHNHYTQKSLSLSLG

SEQ ID NO: 189 - protein, 107 aa, synthetic construct
  REGION 1..107: note = synthetic
DIQMTQSPSSVSASVGDRVTITCRASQGISSWLAWYQQKPGKAPKLLIYAASSLQSGVPSRFSGSGSGTDFTLTISSLQPEDFATYYCQQGSSFPYTFGGGTKVEIK

SEQ ID NO: 190 - protein, 11 aa, synthetic construct
  REGION 1..11: note = synthetic
RASQGISSWLA

SEQ ID NO: 191 - protein, 7 aa, synthetic construct
  REGION 1..7: note = synthetic
AASSLQS

SEQ ID NO: 192 - protein, 9 aa, synthetic construct
  REGION 1..9: note = synthetic
QQGSSFPYT

SEQ ID NO: 193 - protein, 214 aa, synthetic construct
  REGION 1..214: note = synthetic
DIQMTQSPSSVSASVGDRVTITCRASQGISSWLAWYQQKPGKAPKLLIYAASSLQSGVPSRFSGSGSGTDFTLTISSLQPEDFATYYCQQGSSFPYTFGGGTKVEIKRTVAAPSVFIFPPSDEQLKSGTASVVCLLNNFYPREAKVQWKVDNALQSGNSQESVTEQDSKDSTYSLSSTLTLSKADYEKHKVYACEVTHQGLSSPVTKSFNRGEC

SEQ ID NO: 194 - protein, 116 aa, synthetic construct
  REGION 1..116: note = synthetic
QVQLVQSGAEVKKPGSSVKVSCKASGGTFSEYPISWVRQAPGQGLEWMGGIIPYSGTAVYAQKFQGRVTITADESTSTAYMELSSLRSEDTAVYYCARGRHGHETWGQGTLVTVSS

SEQ ID NO: 195 - protein, 9 aa, synthetic construct
  REGION 1..9: note = synthetic
GTFSEYPIS

SEQ ID NO: 196 - protein, 17 aa, synthetic construct
  REGION 1..17: note = synthetic
GIIPYSGTAVYAQKFQG

SEQ ID NO: 197 - protein, 9 aa, synthetic construct
  REGION 1..9: note = synthetic
ARGRHGHET

SEQ ID NO: 198 - protein, 442 aa, synthetic construct
  REGION 1..442: note = synthetic
QVQLVQSGAEVKKPGSSVKVSCKASGGTFSEYPISWVRQAPGQGLEWMGGIIPYSGTAVYAQKFQGRVTITADESTSTAYMELSSLRSEDTAVYYCARGRHGHETWGQGTLVTVSSASTKGPSVFPLAPCSRSTSESTAALGCLVKDYFPEPVTVSWNSGALTSGVHTFPAVLQSSGLYSLSSVVTVPSSSLGTKTYTCNVDHKPSNTKVDKRVESKYGPPCPPCPAPEFLGGPSVFLFPPKPKDTLMISRTPEVTCVVVDVSQEDPEVQFNWYVDGVEVHNAKTKPREEQFNSTYRVVSVLTVLHQDWLNGKEYKCKVSNKGLPSSIEKTISKAKGQPREPQVYTLPPSQEEMTKNQVSLTCLVKGFYPSDIAVEWESNGQPENNYKTTPPVLDSDGSFFLYSRLTVDKSRWQEGNVFSCSVMHEALHNHYTQKSLSLSLG

SEQ ID NO: 199 - protein, 107 aa, synthetic construct
  REGION 1..107: note = synthetic
DIQMTQSPSSVSASVGDRVTITCRASQGISSWLAWYQQKPGKAPKLLIYAASSLQSGVPSRFSGSGSGTDFTLTISSLQPEDFATYYCQQVYSIPWTFGGGTKVEIK

SEQ ID NO: 200 - protein, 11 aa, synthetic construct
  REGION 1..11: note = synthetic
RASQGISSWLA

SEQ ID NO: 201 - protein, 7 aa, synthetic construct
  REGION 1..7: note = synthetic
AASSLQS

SEQ ID NO: 202 - protein, 9 aa, synthetic construct
  REGION 1..9: note = synthetic
QQVYSIPWT

SEQ ID NO: 203 - protein, 214 aa, synthetic construct
  REGION 1..214: note = synthetic
DIQMTQSPSSVSASVGDRVTITCRASQGISSWLAWYQQKPGKAPKLLIYAASSLQSGVPSRFSGSGSGTDFTLTISSLQPEDFATYYCQQVYSIPWTFGGGTKVEIKRTVAAPSVFIFPPSDEQLKSGTASVVCLLNNFYPREAKVQWKVDNALQSGNSQESVTEQDSKDSTYSLSSTLTLSKADYEKHKVYACEVTHQGLSSPVTKSFNRGEC

SEQ ID NO: 204 - protein, 119 aa, synthetic construct
  REGION 1..119: note = synthetic
QLQLQESGPGLVKPSETLSLTCTVSGGSISSSDYPWGWIRQPPGKGLEWIGSIYYSGSTYYNPSLKSRVTISVDTSKNQFSLKLSSVTAADTAVYYCARGPYRQVFDYWGQGTLVTVSS

SEQ ID NO: 205 - protein, 11 aa, synthetic construct
  REGION 1..11: note = synthetic
GSISSSDYPWG

SEQ ID NO: 206 - protein, 16 aa, synthetic construct
  REGION 1..16: note = synthetic
SIYYSGSTYYNPSLKS

SEQ ID NO: 207 - protein, 11 aa, synthetic construct
  REGION 1..11: note = synthetic
ARGPYRQVFDY

SEQ ID NO: 208 - protein, 445 aa, synthetic construct
  REGION 1..445: note = synthetic
QLQLQESGPGLVKPSETLSLTCTVSGGSISSSDYPWGWIRQPPGKGLEWIGSIYYSGSTYYNPSLKSRVTISVDTSKNQFSLKLSSVTAADTAVYYCARGPYRQVFDYWGQGTLVTVSSASTKGPSVFPLAPCSRSTSESTAALGCLVKDYFPEPVTVSWNSGALTSGVHTFPAVLQSSGLYSLSSVVTVPSSSLGTKTYTCNVDHKPSNTKVDKRVESKYGPPCPPCPAPEFLGGPSVFLFPPKPKDTLMISRTPEVTCVVVDVSQEDPEVQFNWYVDGVEVHNAKTKPREEQFNSTYRVVSVLTVLHQDWLNGKEYKCKVSNKGLPSSIEKTISKAKGQPREPQVYTLPPSQEEMTKNQVSLTCLVKGFYPSDIAVEWESNGQPENNYKTTPPVLDSDGSFFLYSRLTVDKSRWQEGNVFSCSVMHEALHNHYTQKSLSLSLG

SEQ ID NO: 209 - protein, 107 aa, synthetic construct
  REGION 1..107: note = synthetic
DIQMTQSPSSVSASVGDRVTITCRASQGISSWLAWYQQKPGKAPKLLIYAASSLQSGVPSRFSGSGSGTDFTLTISSLQPEDFATYYCQQGNSFPYTFGGGTKVEIK

SEQ ID NO: 210 - protein, 11 aa, synthetic construct
  REGION 1..11: note = synthetic
RASQGISSWLA

SEQ ID NO: 211 - protein, 7 aa, synthetic construct
  REGION 1..7: note = sythetic
AASSLQS

SEQ ID NO: 212 - protein, 9 aa, synthetic construct
  REGION 1..9: note = synthetic
QQGNSFPYT

SEQ ID NO: 213 - protein, 214 aa, synthetic construct
  REGION 1..214: note = synthetic
DIQMTQSPSSVSASVGDRVTITCRASQGISSWLAWYQQKPGKAPKLLIYAASSLQSGVPSRFSGSGSGTDFTLTISSLQPEDFATYYCQQGNSFPYTFGGGTKVEIKRTVAAPSVFIFPPSDEQLKSGTASVVCLLNNFYPREAKVQWKVDNALQSGNSQESVTEQDSKDSTYSLSSTLTLSKADYEKHKVYACEVTHQGLSSPVTKSFNRGEC

SEQ ID NO: 214 - protein, 119 aa, synthetic construct
  REGION 1..119: note = synthetic
QLQLQESSPGLVKPSETLSLTCTVSGGSISSPDYPWGWIRQPPGKGLEWIGSIFYSGNTYYNPSLKSRVTISVDTSKNQFSLKLSSVTAADTAVYYCARGPHRQVFDYWGQGTLVTVSS

SEQ ID NO: 215 - protein, 11 aa, synthetic construct
  REGION 1..11: note = synthetic
GSISSPDYPWG

SEQ ID NO: 216 - protein, 16 aa, synthetic construct
  REGION 1..16: note = synthetic
SIFYSGNTYYNPSLKS

SEQ ID NO: 217 - protein, 11 aa, synthetic construct
  REGION 1..11: note = synthetic
ARGPHRQVFDY

SEQ ID NO: 218 - protein, 445 aa, synthetic construct
  REGION 1..445: note = synthetic
QLQLQESSPGLVKPSETLSLTCTVSGGSISSPDYPWGWIRQPPGKGLEWIGSIFYSGNTYYNPSLKSRVTISVDTSKNQFSLKLSSVTAADTAVYYCARGPHRQVFDYWGQGTLVTVSSASTKGPSVFPLAPCSRSTSESTAALGCLVKDYFPEPVTVSWNSGALTSGVHTFPAVLQSSGLYSLSSVVTVPSSSLGTKTYTCNVDHKPSNTKVDKRVESKYGPPCPPCPAPEFLGGPSVFLFPPKPKDTLMISRTPEVTCVVVDVSQEDPEVQFNWYVDGVEVHNAKTKPREEQFNSTYRVVSVLTVLHQDWLNGKEYKCKVSNKGLPSSIEKTISKAKGQPREPQVYTLPPSQEEMTKNQVSLTCLVKGFYPSDIAVEWESNGQPENNYKTTPPVLDSDGSFFLYSRLTVDKSRWQEGNVFSCSVMHEALHNHYTQKSLSLSLG

SEQ ID NO: 219 - protein, 107 aa, synthetic construct
  REGION 1..107: note = synthetic
DIQMTQSPSSVSASVGDRVTITCRASQGISSWLAWYQQKPGKAPKLLIYAASSLQSGVPSRFSGSGSGTDFTLTISSLQPEDFATYYCQQGWSFPYTFGGGTKVEIK

SEQ ID NO: 220 - protein, 11 aa, synthetic construct
  REGION 1..11: note = synthetic
RASQGISSWLA

SEQ ID NO: 221 - protein, 7 aa, synthetic construct
  REGION 1..7: note = synthetic
AASSLQS

SEQ ID NO: 222 - protein, 9 aa, synthetic construct
  REGION 1..9: note = synthetic
QQGWSFPYT

SEQ ID NO: 223 - protein, 214 aa, synthetic construct
  REGION 1..214: note = synthetic
DIQMTQSPSSVSASVGDRVTITCRASQGISSWLAWYQQKPGKAPKLLIYAASSLQSGVPSRFSGSGSGTDFTLTISSLQPEDFATYYCQQGWSFPYTFGGGTKVEIKRTVAAPSVFIFPPSDEQLKSGTASVVCLLNNFYPREAKVQWKVDNALQSGNSQESVTEQDSKDSTYSLSSTLTLSKADYEKHKVYACEVTHQGLSSPVTKSFNRGEC

SEQ ID NO: 224 - protein, 119 aa, synthetic construct
  REGION 1..119: note = synthetic
QLQLQESGPGLVKPSETLSLTCTVSGGSISSSEYGWGWIRQPPGKGLEWIGSIVNSGSTYYNPSLKSRVTISVDTSKNQFSLKLSSVTAADTAVYYCARGPYRQVFDYWGQGTLVTVSS

SEQ ID NO: 225 - protein, 11 aa, synthetic construct
  REGION 1..11: note = synthetic
GSISSSEYGWG

SEQ ID NO: 226 - protein, 16 aa, synthetic construct
  REGION 1..16: note = synthetic
SIVNSGSTYYNPSLKS

SEQ ID NO: 227 - protein, 11 aa, synthetic construct
  REGION 1..11: note = synthetic
ARGPYRQVFDY

SEQ ID NO: 228 - protein, 445 aa, synthetic construct
  REGION 1..445: note = synthetic
QLQLQESGPGLVKPSETLSLTCTVSGGSISSSEYGWGWIRQPPGKGLEWIGSIVNSGSTYYNPSLKSRVTISVDTSKNQFSLKLSSVTAADTAVYYCARGPYRQVFDYWGQGTLVTVSSASTKGPSVFPLAPCSRSTSESTAALGCLVKDYFPEPVTVSWNSGALTSGVHTFPAVLQSSGLYSLSSVVTVPSSSLGTKTYTCNVDHKPSNTKVDKRVESKYGPPCPPCPAPEFLGGPSVFLFPPKPKDTLMISRTPEVTCVVVDVSQEDPEVQFNWYVDGVEVHNAKTKPREEQFNSTYRVVSVLTVLHQDWLNGKEYKCKVSNKGLPSSIEKTISKAKGQPREPQVYTLPPSQEEMTKNQVSLTCLVKGFYPSDIAVEWESNGQPENNYKTTPPVLDSDGSFFLYSRLTVDKSRWQEGNVFSCSVMHEALHNHYTQKSLSLSLG

SEQ ID NO: 229 - protein, 107 aa, synthetic construct; identical to SEQ ID NO: 219
  REGION 1..107: note = synthetic

SEQ ID NO: 230 - protein, 11 aa, synthetic construct
  REGION 1..11: note = synthetic
RASQGISSWLA

SEQ ID NO: 231 - protein, 7 aa, synthetic construct
  REGION 1..7: note = synthetic
AASSLQS

SEQ ID NO: 232 - protein, 9 aa, synthetic construct
  REGION 1..9: note = synthetic
QQGWSFPYT

SEQ ID NO: 233 - protein, 214 aa, synthetic construct; identical to SEQ ID NO: 223
  REGION 1..214: note = synthetic

SEQ ID NO: 234 - protein, 119 aa, synthetic construct
  REGION 1..119: note = synthetic
QLQLQESGPGLVKPSETLSLTCTVSGGSIFSSDYYWSWIRQPPGKGLEWIGVIAYSGSTYYNPSLKSRVTISVDTSKNQFSLKLSSATAADTAVYYCARGPFRQVFDYWGQGTLVTVSS

SEQ ID NO: 235 - protein, 11 aa, synthetic construct
  REGION 1..11: note = synthetic
GSIFSSDYYWS

SEQ ID NO: 236 - protein, 16 aa, synthetic construct
  REGION 1..16: note = synthetic
VIAYSGSTYYNPSLKS

SEQ ID NO: 237 - protein, 11 aa, synthetic construct
  REGION 1..11: note = synthetic
ARGPFRQVFDY

SEQ ID NO: 238 - protein, 445 aa, synthetic construct
  REGION 1..445: note = synthetic
QLQLQESGPGLVKPSETLSLTCTVSGGSIFSSDYYWSWIRQPPGKGLEWIGVIAYSGSTYYNPSLKSRVTISVDTSKNQFSLKLSSATAADTAVYYCARGPFRQVFDYWGQGTLVTVSSASTKGPSVFPLAPCSRSTSESTAALGCLVKDYFPEPVTVSWNSGALTSGVHTFPAVLQSSGLYSLSSVVTVPSSSLGTKTYTCNVDHKPSNTKVDKRVESKYGPPCPPCPAPEFLGGPSVFLFPPKPKDTLMISRTPEVTCVVVDVSQEDPEVQFNWYVDGVEVHNAKTKPREEQFNSTYRVVSVLTVLHQDWLNGKEYKCKVSNKGLPSSIEKTISKAKGQPREPQVYTLPPSQEEMTKNQVSLTCLVKGFYPSDIAVEWESNGQPENNYKTTPPVLDSDGSFFLYSRLTVDKSRWQEGNVFSCSVMHEALHNHYTQKSLSLSLG

SEQ ID NO: 239 - protein, 107 aa, synthetic construct; identical to SEQ ID NO: 189
  REGION 1..107: note = synthetic

SEQ ID NO: 240 - protein, 11 aa, synthetic construct
  REGION 1..11: note = synthetic
RASQGISSWLA

SEQ ID NO: 241 - protein, 7 aa, synthetic construct
  REGION 1..7: note = synthetic
AASSLQS

SEQ ID NO: 242 - protein, 9 aa, synthetic construct
  REGION 1..9: note = synthetic
QQGSSFPYT

SEQ ID NO: 243 - protein, 214 aa, synthetic construct; identical to SEQ ID NO: 193
  REGION 1..214: note = synthetic

SEQ ID NO: 244 - protein, 119 aa, synthetic construct
  REGION 1..119: note = synthetic
QLQLQESGPGLVKPSETLSLTCTVSGGSISSPDYPWGWIRQPPGKGLEWIGSIFYSGNTYYNPSLKSRVTISVDTSKNQFSLKLSSVTAADTAVYYCARGPFRQVFDYWGQGTLVTVSS

SEQ ID NO: 245 - protein, 11 aa, synthetic construct
  REGION 1..11: note = synthetic
GSISSPDYPWG

SEQ ID NO: 246 - protein, 16 aa, synthetic construct
  REGION 1..16: note = synthetic
SIFYSGNTYYNPSLKS

SEQ ID NO: 247 - protein, 11 aa, synthetic construct
  REGION 1..11: note = synthetic
ARGPFRQVFDY

SEQ ID NO: 248 - protein, 445 aa, synthetic construct
  REGION 1..445: note = synthetic
QLQLQESGPGLVKPSETLSLTCTVSGGSISSPDYPWGWIRQPPGKGLEWIGSIFYSGNTYYNPSLKSRVTISVDTSKNQFSLKLSSVTAADTAVYYCARGPFRQVFDYWGQGTLVTVSSASTKGPSVFPLAPCSRSTSESTAALGCLVKDYFPEPVTVSWNSGALTSGVHTFPAVLQSSGLYSLSSVVTVPSSSLGTKTYTCNVDHKPSNTKVDKRVESKYGPPCPPCPAPEFLGGPSVFLFPPKPKDTLMISRTPEVTCVVVDVSQEDPEVQFNWYVDGVEVHNAKTKPREEQFNSTYRVVSVLTVLHQDWLNGKEYKCKVSNKGLPSSIEKTISKAKGQPREPQVYTLPPSQEEMTKNQVSLTCLVKGFYPSDIAVEWESNGQPENNYKTTPPVLDSDGSFFLYSRLTVDKSRWQEGNVFSCSVMHEALHNHYTQKSLSLSLG

SEQ ID NO: 249 - protein, 107 aa, synthetic construct; identical to SEQ ID NO: 219
  REGION 1..107: note = synthetic

SEQ ID NO: 250 - protein, 11 aa, synthetic construct
  REGION 1..11: note = synthetic
RASQGISSWLA

SEQ ID NO: 251 - protein, 7 aa, synthetic construct
  REGION 1..7: note = synthetic
AASSLQS

SEQ ID NO: 252 - protein, 9 aa, synthetic construct
  REGION 1..9: note = synthetic
QQGWSFPYT

SEQ ID NO: 253 - protein, 214 aa, synthetic construct; identical to SEQ ID NO: 223
  REGION 1..214: note = synthetic

SEQ ID NO: 254 - protein, 194 aa, synthetic construct
  REGION 1..194: note = synthetic
MTMRHNWTPDLSPLWVLLLCAHVVTLLVRATPVSQTTTAATASVRSTKDPCPSQPPVFPAAKQCPALEVTWPEVEVPLNGTLSLSCVACSRFPNFSILYWLGNGSFIEHLPGRLWEGSTSRERGSTGTQLCKALVLEQLTPALHSTNFSCVLVDPEQVVQRHVVLAQLWAGLRATLPPTQEALPSSHSSPQQQG

SEQ ID NO: 255 - protein, 164 aa, synthetic construct
  REGION 1..164: note = synthetic
TPVSQTTTAATASVRSTKDPCPSQPPVFPAAKQCPALEVTWPEVEVPLNGTLSLSCVACSRFPNFSILYWLGNGSFIEHLPGRLWEGSTSRERGSTGTQLCKALVLEQLTPALHSTNFSCVLVDPEQVVQRHVVLAQLWAGLRATLPPTQEALPSSHSSPQQQG

SEQ ID NO: 256 - protein, 193 aa, synthetic construct
  REGION 1..193: note = synthetic
MTMRHCWTAGPSSWWVLLLYVHVILARATSAPQTTATVLTGSSKDPCSSWSPAVPTKQYPALDVIWPEKEVPLNGTLTLSCTACSRFPYFSILYWLGNGSFIEHLPGRLKEGHTSREHRNTSTWLHRALVLEELSPTLRSTNFSCLFVDPGQVAQYHIILAQLWDGLKTAPSPSQETLSSHSPVSRSAGPGVA

SEQ ID NO: 257 - protein, 165 aa, synthetic construct
  REGION 1..165: note = synthetic
TSAPQTTATVLTGSSKDPCSSWSPAVPTKQYPALDVIWPEKEVPLNGTLTLSCTACSRFPYFSILYWLGNGSFIEHLPGRLKEGHTSREHRNTSTWLHRALVLEELSPTLRSTNFSCLFVDPGQVAQYHIILAQLWDGLKTAPSPSQETLSSHSPVSRSAGPGVA

SEQ ID NO: 258 - protein, 193 aa, synthetic construct
  REGION 1..193: note = synthetic
MAAEPVEDNCINFVAMKFIDNTLYFIAEDDENLESDYFGKLESKLSVIRNLNDQVLFIDQGNRPLFEDMTDSDCRDNAPRTIFIISMYKDSQPRGMAVTISVKCEKISTLSCENKIISFKEMNPPDNIKDTKSDIIFFQRSVPGHDNKMQFESSSYEGYFLACEKERDLFKLILKKEDELGDRSIMFTVQNED

SEQ ID NO: 259 - protein, 192 aa, synthetic construct
  REGION 1..192: note = synthetic
MAAMSEDSCVNFKEMMFIDNTLYFIPEENGDLESDNFGRLHCTTAVIRNINDQVLFVDKRQPVFEDMTDIDQSASEPQTRLIIYMYKDSEVRGLAVTLSVKDSKMSTLSCKNKIISFEEMDPPENIDDIQSDLIFFQKRVPGHNKMEFESSLYEGHFLACQKEDDAFKLILKKKDENGDKSVMFTLTNLHQS

SEQ ID NO: 260 - protein, 120 aa, synthetic construct
  REGION 1..120: note = synthetic
QVQLVQSGAEVKKPGASVKVSCKASGYTFTDYNINWVRQAPGQGLEWMGYIYPYIGGSGYAQKFQGRVTMTRDTSTSTVYMELSSLRSEDTAVYYCAREDKTARNAMDYWGQGTLVTVSS

SEQ ID NO: 261 - protein, 8 aa, synthetic construct
  REGION 1..8: note = synthetic
GYTFTDYN

SEQ ID NO: 262 - protein, 8 aa, synthetic construct
  REGION 1..8: note = synthetic
IYPYIGGS

SEQ ID NO: 263 - protein, 13 aa, synthetic construct
  REGION 1..13: note = synthetic
AREDKTARNAMDY

SEQ ID NO: 264 - protein, 445 aa, synthetic construct
  REGION 1..445: note = synthetic
QVQLVQSGAEVKKPGASVKVSCKASGYTFTDYNINWVRQAPGQGLEWMGYIYPYIGGSGYAQKFQGRVTMTRDTSTSTVYMELSSLRSEDTAVYYCAREDKTARNAMDYWGQGTLVTVSSASTKGPSVFPLAPCSRSTSESTAALGCLVKDYFPEPVTVSWNSGALTSGVHTFPAVLQSSGLYSLSSVVTVPSSSLGTKTYTCNVDHKPSNTKVDKRVESKYGPPCPPCPAPEFLGGPSVFLFPPKPKDTLMISRTPEVTCVVVDVSQEDPEVQFNWYVDGVEVHNAKTKPREEQFNSTYRVVSVLTVLHQDWLNGKEYKCKVSNKGLPSSIEKTISKAKGQPREPQVYTLPPSQEEMTKNQVSLTCLVKGFYPSDIAVEWESNGQPENNYKTTPPVLDSDGSFFLYSRLTVDKSRWQEGNVFSCSVMHEALHNHYTQKSLSLSG

SEQ ID NO: 265 - protein, 107 aa, synthetic construct
  REGION 1..107: note = synthetic
DIQMTQSPSSLSASVGDRVTITCRVSENIYSNLAWYQQKPGKAPKLLIYEATNLAEGVPSRFSGSGSGTDFTLTISSLQPEDFATYYCQHFWGTPYTFGQGTKLEIK

SEQ ID NO: 266 - protein, 6 aa, synthetic construct
  REGION 1..6: note = synthetic
ENIYSN

SEQ ID NO: 267 - skipped

SEQ ID NO: 268 - protein, 9 aa, synthetic construct
  REGION 1..9: note = synthetic
QHFWGTPYT

SEQ ID NO: 269 - protein, 214 aa, synthetic construct
  REGION 1..214: note = synthetic
DIQMTQSPSSLSASVGDRVTITCRVSENIYSNLAWYQQKPGKAPKLLIYEATNLAEGVPSRFSGSGSGTDFTLTISSLQPEDFATYYCQHFWGTPYTFGQGTKLEIKRTVAAPSVFIFPPSDEQLKSGTASVVCLLNNFYPREAKVQWKVDNALQSGNSQESVTEQDSKDSTYSLSSTLTLSKADYEKHKVYACEVTHQGLSSPVTKSFNRGEC

SEQ ID NO: 270 - protein, 119 aa, synthetic construct
  REGION 1..119: note = synthetic
QVQLVQSGAEVKKPGASVKVSCKASGYAFTNYLIEWVRQAPGQGLEWIGVINPGSGGIYYAQKFQGRVTMTADTSTSTVYMELSSLRSEDTAVYYCARSETHDTWFAYWGQGTLVTVSS

SEQ ID NO: 271 - protein, 8 aa, synthetic construct
  REGION 1..8: note = synthetic
GYAFTNYL

SEQ ID NO: 272 - protein, 8 aa, synthetic construct
  REGION 1..8: note = synthetic
INPGSGGI

SEQ ID NO: 273 - protein, 12 aa, synthetic construct
  REGION 1..12: note = synthetic
ARSETHDTWFAY

SEQ ID NO: 274 - protein, 444 aa, synthetic construct
  REGION 1..444: note = synthetic
QVQLVQSGAEVKKPGASVKVSCKASGYAFTNYLIEWVRQAPGQGLEWIGVINPGSGGIYYAQKFQGRVTMTADTSTSTVYMELSSLRSEDTAVYYCARSETHDTWFAYWGQGTLVTVSSASTKGPSVFPLAPCSRSTSESTAALGCLVKDYFPEPVTVSWNSGALTSGVHTFPAVLQSSGLYSLSSVVTVPSSSLGTKTYTCNVDHKPSNTKVDKRVESKYGPPCPPCPAPEFLGGPSVFLFPPKPKDTLMISRTPEVTCVVVDVSQEDPEVQFNWYVDGVEVHNAKTKPREEQFNSTYRVVSVLTVLHQDWLNGKEYKCKVSNKGLPSSIEKTISKAKGQPREPQVYTLPPSQEEMTKNQVSLTCLVKGFYPSDIAVEWESNGQPENNYKTTPPVLDSDGSFFLYSRLTVDKSRWQEGNVFSCSVMHEALHNHYTQKSLSLSG

SEQ ID NO: 275 - protein, 107 aa, synthetic construct
  REGION 1..107: note = synthetic
DIQMTQSPSSLSASVGDRVTITCKASQSVRIAVAWFQQKPGKAPKALIYLASTRHTGVPSRFSGSGSGTDFTLTISSVQPEDFATYYCLQHWNYPYTFGQGTKLEIK

SEQ ID NO: 276 - protein, 6 aa, synthetic construct
  REGION 1..6: note = synthetic
QSVRIA

SEQ ID NO: 277 - skipped

SEQ ID NO: 278 - protein, 9 aa, synthetic construct
  REGION 1..9: note = synthetic
LQHWNYPYT

SEQ ID NO: 279 - protein, 214 aa, synthetic construct
  REGION 1..214: note = synthetic
DIQMTQSPSSLSASVGDRVTITCKASQSVRIAVAWFQQKPGKAPKALIYLASTRHTGVPSRFSGSGSGTDFTLTISSVQPEDFATYYCLQHWNYPYTFGQGTKLEIKRTVAAPSVFIFPPSDEQLKSGTASVVCLLNNFYPREAKVQWKVDNALQSGNSQESVTEQDSKDSTYSLSSTLTLSKADYEKHKVYACEVTHQGLSSPVTKSFNRGEC

SEQ ID NO: 280 - protein, 121 aa, synthetic construct
  REGION 1..121: note = synthetic
EVQLVETGGGLIQPGRSLRLSCAASGFTFSSYAMHWVRQAPGKGLEWVAVISYDGTPVYYADSVKGRFTISRDNSKNTLYLQMNSLRAEDTAVYYCARDPLPLHYYGMDVWGQGTTVTVSS

SEQ ID NO: 281 - protein, 8 aa, synthetic construct
  REGION 1..8: note = synthetic
GFTFSSYA

SEQ ID NO: 282 - protein, 8 aa, synthetic construct
  REGION 1..8: note = synthetic
ISYDGTPV

SEQ ID NO: 283 - protein, 14 aa, synthetic construct
  REGION 1..14: note = synthetic
ARDPLPLHYYGMDV

SEQ ID NO: 284 - protein, 446 aa, synthetic construct
  REGION 1..446: note = synthetic
EVQLVETGGGLIQPGRSLRLSCAASGFTFSSYAMHWVRQAPGKGLEWVAVISYDGTPVYYADSVKGRFTISRDNSKNTLYLQMNSLRAEDTAVYYCARDPLPLHYYGMDVWGQGTTVTVSSASTKGPSVFPLAPCSRSTSESTAALGCLVKDYFPEPVTVSWNSGALTSGVHTFPAVLQSSGLYSLSSVVTVPSSSLGTKTYTCNVDHKPSNTKVDKRVESKYGPPCPPCPAPEFLGGPSVFLFPPKPKDTLMISRTPEVTCVVVDVSQEDPEVQFNWYVDGVEVHNAKTKPREEQFNSTYRVVSVLTVLHQDWLNGKEYKCKVSNKGLPSSIEKTISKAKGQPREPQVYTLPPSQEEMTKNQVSLTCLVKGFYPSDIAVEWESNGQPENNYKTTPPVLDSDGSFFLYSRLTVDKSRWQEGNVFSCSVMHEALHNHYTQKSLSLSG

SEQ ID NO: 285 - protein, 111 aa, synthetic construct
  REGION 1..111: note = synthetic
QSALTQPRSASGNPGQRVTISCSGSSSNMGRRPVNWYQQIPGTAPKLLIYSQNQRPSGVPDRFSGSQSGTSASLTISGLQSEDEAEYFCAVWDGDRRSLQLGGGTQLAVLG

SEQ ID NO: 286 - protein, 8 aa, synthetic construct
  REGION 1..8: note = synthetic
SSNMGRRP

SEQ ID NO: 287 - skipped

SEQ ID NO: 288 - protein, 11 aa, synthetic construct
  REGION 1..11: note = synthetic
AVWDGDRRSLQ

SEQ ID NO: 289 - protein, 216 aa, synthetic construct
  REGION 1..216: note = synthetic
QSALTQPRSASGNPGQRVTISCSGSSSNMGRRPVNWYQQIPGTAPKLLIYSQNQRPSGVPDRFSGSQSGTSASLTISGLQSEDEAEYFCAVWDGDRRSLQLGGGTQLAVLGQPKAAPSVTLFPPSSEELQANKATLVCLISDFYPGAVTVAWKADSSPVKAGVETTTPSKQSNNKYAASSYLSLTPEQWKSHRSYSCQVTHEGSTVEKTVAPTECS

SEQ ID NO: 290 - protein, 121 aa, synthetic construct
  REGION 1..121: note = synthetic
EVQLVETGGGLIQPGRSLRLSCAASGFTFSSYAMHWVRQAPGKGLEWVAVISYAGEVKYYADSVKGRFTISRDNSKNTLYLQMNSLRAEDTAVYYCARDPLPLHYYGMDVWGQGTTVTVSS

SEQ ID NO: 291 - protein, 8 aa, synthetic construct
  REGION 1..8: note = synthetic
GFTFSSYA

SEQ ID NO: 292 - protein, 8 aa, synthetic construct
  REGION 1..8: note = synthetic
ISYAGEVK

SEQ ID NO: 293 - protein, 14 aa, synthetic construct
  REGION 1..14: note = synthetic
ARDPLPLHYYGMDV

SEQ ID NO: 294 - protein, 446 aa, synthetic construct
  REGION 1..446: note = synthetic
EVQLVETGGGLIQPGRSLRLSCAASGFTFSSYAMHWVRQAPGKGLEWVAVISYAGEVKYYADSVKGRFTISRDNSKNTLYLQMNSLRAEDTAVYYCARDPLPLHYYGMDVWGQGTTVTVSSASTKGPSVFPLAPCSRSTSESTAALGCLVKDYFPEPVTVSWNSGALTSGVHTFPAVLQSSGLYSLSSVVTVPSSSLGTKTYTCNVDHKPSNTKVDKRVESKYGPPCPPCPAPEFLGGPSVFLFPPKPKDTLMISRTPEVTCVVVDVSQEDPEVQFNWYVDGVEVHNAKTKPREEQFNSTYRVVSVLTVLHQDWLNGKEYKCKVSNKGLPSSIEKTISKAKGQPREPQVYTLPPSQEEMTKNQVSLTCLVKGFYPSDIAVEWESNGQPENNYKTTPPVLDSDGSFFLYSRLTVDKSRWQEGNVFSCSVMHEALHNHYTQKSLSLSG

SEQ ID NO: 295 - protein, 111 aa, synthetic construct
  REGION 1..111: note = synthetic
QSALTQPRSASGNPGQRVTISCSGSSSNMGRRPVNWYQQIPGTAPKLLIYSQNQRPSGVPDRFSGSQSGTSASLTISGLQSEDEAEYFCAVWDDIGRVLQLGGGTQLAVLG

SEQ ID NO: 296 - protein, 8 aa, synthetic construct
  REGION 1..8: note = synthetic
SSNMGRRP

SEQ ID NO: 297 - skipped

SEQ ID NO: 298 - protein, 11 aa, synthetic construct
  REGION 1..11: note = synthetic
AVWDDIGRVLQ

SEQ ID NO: 299 - protein, 216 aa, synthetic construct
  REGION 1..216: note = synthetic
QSALTQPRSASGNPGQRVTISCSGSSSNMGRRPVNWYQQIPGTAPKLLIYSQNQRPSGVPDRFSGSQSGTSASLTISGLQSEDEAEYFCAVWDDIGRVLQLGGGTQLAVLGQPKAAPSVTLFPPSSEELQANKATLVCLISDFYPGAVTVAWKADSSPVKAGVETTTPSKQSNNKYAASSYLSLTPEQWKSHRSYSCQVTHEGSTVEKTVAPTECS

SEQ ID NO: 300 - protein, 121 aa, synthetic construct
  REGION 1..121: note = synthetic
QVQLVESGGGLVQPGGSLRLSCAASGFTFSSYGMHWVRQAPGKGLEWVAFIRYDGSNKYYADSVKGRFTISRDNSKNTLYLQMNSLRAEDTAVYYCAKEMLVQDYYYMDVWGQGTTVTVSS

SEQ ID NO: 301 - protein, 8 aa, synthetic construct
  REGION 1..8: note = synthetic
GFTFSSYG

SEQ ID NO: 302 - protein, 8 aa, synthetic construct
  REGION 1..8: note = synthetic
IRYDGSNK

SEQ ID NO: 303 - protein, 14 aa, synthetic construct
  REGION 1..14: note = synthetic
AKEMLVQDYYYMDV

SEQ ID NO: 304 - protein, 448 aa, synthetic construct
  REGION 1..448: note = synthetic
QVQLVESGGGLVQPGGSLRLSCAASGFTFSSYGMHWVRQAPGKGLEWVAFIRYDGSNKYYADSVKGRFTISRDNSKNTLYLQMNSLRAEDTAVYYCAKEMLVQDYYYMDVWGQGTTVTVSSASTKGPSVFPLAPCSRSTSESTAALGCLVKDYFPEPVTVSWNSGALTSGVHTFPAVLQSSGLYSLSSVVTVPSSSLGTKTYTCNVDHKPSNTKVDKRVESKYGPPCPPCPAPEFLGGPSVFLFPPKPKDTLMISRTPEVTCVVVDVSQEDPEVQFNWYVDGVEVHNAKTKPREEQFNSTYRVVSVLTVLHQDWLNGKEYKCKVSNKGLPSSIEKTISKAKGQPREPQVYTLPPSQEEMTKNQVSLTCLVKGFYPSDIAVEWESNGQPENNYKTTPPVLDSDGSFFLYSRLTVDKSRWQEGNVFSCSVMHEALHNHYTQKSLSLSPGK

SEQ ID NO: 305 - protein, 113 aa, synthetic construct
  REGION 1..113: note = synthetic
DVVMTQSPLSLPVSPGEPASISCRSSQNLLHRNGINYLNWYLQKPGQSPQLLIYWGSNRASGVPDRFSGSGSGTDFTLKISRVEAEDVGVYYCMQGLQIPPTFGQGTKVDIKR

SEQ ID NO: 306 - protein, 11 aa, synthetic construct
  REGION 1..11: note = synthetic
QNLLHRNGINY

SEQ ID NO: 307 - skipped

SEQ ID NO: 308 - protein, 9 aa, synthetic construct
  REGION 1..9: note = synthetic
MQGLQIPPT

SEQ ID NO: 309 - protein, 219 aa, synthetic construct
  REGION 1..219: note = synthetic
DVVMTQSPLSLPVSPGEPASISCRSSQNLLHRNGINYLNWYLQKPGQSPQLLIYWGSNRASGVPDRFSGSGSGTDFTLKISRVEAEDVGVYYCMQGLQIPPTFGQGTKVDIKRTVAAPSVFIFPPSDEQLKSGTASVVCLLNNFYPREAKVQWKVDNALQSGNSQESVTEQDSKDSTYSLSSTLTLSKADYEKHKVYACEVTHQGLSSPVTKSFNRGEC

SEQ ID NO: 310 - protein, 121 aa, synthetic construct
  REGION 1..121: note = synthetic
EVQLVETGGGLIQPGRSLRLSCAASGFTFSSYAMHWVRQAPGKGLEWVAVISYDGSNKYYADSVKGRFTISRDNSKNTLYLQMNSLRAEDTAVYYCARDPLPLHYYGMDVWGQGTTVTVSS

SEQ ID NO: 311 - protein, 8 aa, synthetic construct
  REGION 1..8: note = synthetic
GFTFSSYA

SEQ ID NO: 312 - protein, 8 aa, synthetic construct
  REGION 1..8: note = synthetic
ISYDGSNK

SEQ ID NO: 313 - protein, 14 aa, synthetic construct
  REGION 1..14: note = synthetic
ARDPLPLHYYGMDV

SEQ ID NO: 314 - protein, 448 aa, synthetic construct
  REGION 1..448: note = synthetic
EVQLVETGGGLIQPGRSLRLSCAASGFTFSSYAMHWVRQAPGKGLEWVAVISYDGSNKYYADSVKGRFTISRDNSKNTLYLQMNSLRAEDTAVYYCARDPLPLHYYGMDVWGQGTTVTVSSASTKGPSVFPLAPCSRSTSESTAALGCLVKDYFPEPVTVSWNSGALTSGVHTFPAVLQSSGLYSLSSVVTVPSSSLGTKTYTCNVDHKPSNTKVDKRVESKYGPPCPPCPAPEFLGGPSVFLFPPKPKDTLMISRTPEVTCVVVDVSQEDPEVQFNWYVDGVEVHNAKTKPREEQFNSTYRVVSVLTVLHQDWLNGKEYKCKVSNKGLPSSIEKTISKAKGQPREPQVYTLPPSQEEMTKNQVSLTCLVKGFYPSDIAVEWESNGQPENNYKTTPPVLDSDGSFFLYSRLTVDKSRWQEGNVFSCSVMHEALHNHYTQKSLSLSPGK

SEQ ID NO: 315 - protein, 111 aa, synthetic construct
  REGION 1..111: note = synthetic
QSALTQPRSASGNPGQRVTISCSGSSSNMGRRPVNWYQQIPGTAPKLLIYSQNQRPSGVPDRFSGSQSGTSASLTISGLQSEDEAEYFCAVWDDSLSSLQLGGGTQLAVLG

SEQ ID NO: 316 - protein, 8 aa, synthetic construct
  REGION 1..8: note = synthetic
SSNMGRRP

SEQ ID NO: 317 - skipped

SEQ ID NO: 318 - protein, 11 aa, synthetic construct
  REGION 1..11: note = synthetic
AVWDDSLSSLQ

SEQ ID NO: 319 - protein, 216 aa, synthetic construct
  REGION 1..216: note = synthetic
QSALTQPRSASGNPGQRVTISCSGSSSNMGRRPVNWYQQIPGTAPKLLIYSQNQRPSGVPDRFSGSQSGTSASLTISGLQSEDEAEYFCAVWDDSLSSLQLGGGTQLAVLGQPKAAPSVTLFPPSSEELQANKATLVCLISDFYPGAVTVAWKADSSPVKAGVETTTPSKQSNNKYAASSYLSLTPEQWKSHRSYSCQVTHEGSTVEKTVAPTECS

SEQ ID NO: 320 - protein, 121 aa, synthetic construct; identical to SEQ ID NO: 310
  REGION 1..121: note = synthetic

SEQ ID NO: 321 - protein, 8 aa, synthetic construct
  REGION 1..8: note = synthetic
GFTFSSYA

SEQ ID NO: 322 - protein, 8 aa, synthetic construct
  REGION 1..8: note = synthetic
ISYDGSNK

SEQ ID NO: 323 - protein, 14 aa, synthetic construct
  REGION 1..14: note = synthetic
ARDPLPLHYYGMDV

SEQ ID NO: 324 - protein, 448 aa, synthetic construct; identical to SEQ ID NO: 314
  REGION 1..448: note = synthetic

SEQ ID NO: 325 - protein, 111 aa, synthetic construct
  REGION 1..111: note = synthetic
QSALTQPRSASGNPGQRVTISCSGSSSNMGRRPVNWYQQIPGTAPKLLIYSQNQRPSGVPDRFSGSQSGTSASLTISGLQSEDEAEYFCAVWDDSLFSLLLGGGTQLAVLG

SEQ ID NO: 326 - protein, 8 aa, synthetic construct
  REGION 1..8: note = synthetic
SSNMGRRP

SEQ ID NO: 327 - skipped

SEQ ID NO: 328 - protein, 11 aa, synthetic construct
  REGION 1..11: note = synthetic
AVWDDSLFSLL

SEQ ID NO: 329 - protein, 216 aa, synthetic construct
  REGION 1..216: note = synthetic
QSALTQPRSASGNPGQRVTISCSGSSSNMGRRPVNWYQQIPGTAPKLLIYSQNQRPSGVPDRFSGSQSGTSASLTISGLQSEDEAEYFCAVWDDSLFSLLLGGGTQLAVLGQPKAAPSVTLFPPSSEELQANKATLVCLISDFYPGAVTVAWKADSSPVKAGVETTTPSKQSNNKYAASSYLSLTPEQWKSHRSYSCQVTHEGSTVEKTVAPTECS

SEQ ID NO: 330 - protein, 121 aa, synthetic construct
  REGION 1..121: note = synthetic
QVQLQESGPGLVKPSETLSLTCTVSGGSISSSSYYWGWIRQPPGKGLEWIGSIYYSGSTYYNPSLKSRVTISVDTSKNQFSLKLSSVTAADTAVYYCARQGAAAGNPFDIWGQGTMVTVSS

SEQ ID NO: 331 - protein, 10 aa, synthetic construct
  REGION 1..10: note = synthetic
GGSISSSSYY

SEQ ID NO: 332 - protein, 7 aa, synthetic construct
  REGION 1..7: note = synthetic
IYYSGST

SEQ ID NO: 333 - protein, 13 aa, synthetic construct
  REGION 1..13: note = synthetic
ARQGAAAGNPFDI

SEQ ID NO: 334 - protein, 448 aa, synthetic construct
  REGION 1..448: note = synthetic
QVQLQESGPGLVKPSETLSLTCTVSGGSISSSSYYWGWIRQPPGKGLEWIGSIYYSGSTYYNPSLKSRVTISVDTSKNQFSLKLSSVTAADTAVYYCARQGAAAGNPFDIWGQGTMVTVSSASTKGPSVFPLAPCSRSTSESTAALGCLVKDYFPEPVTVSWNSGALTSGVHTFPAVLQSSGLYSLSSVVTVPSSSLGTKTYTCNVDHKPSNTKVDKRVESKYGPPCPPCPAPEFLGGPSVFLFPPKPKDTLMISRTPEVTCVVVDVSQEDPEVQFNWYVDGVEVHNAKTKPREEQFNSTYRVVSVLTVLHQDWLNGKEYKCKVSNKGLPSSIEKTISKAKGQPREPQVYTLPPSQEEMTKNQVSLTCLVKGFYPSDIAVEWESNGQPENNYKTTPPVLDSDGSFFLYSRLTVDKSRWQEGNVFSCSVMHEALHNHYTQKSLSLSPGK

SEQ ID NO: 335 - protein, 111 aa, synthetic construct
  REGION 1..111: note = synthetic
QSVLTQPPSVSGTPGQRVTISCSGSSSNIGSNFVYWHQQLTGTAPKLLIYRNTQRPSGVPDRFSGSKSGTSASLAIGGLRSEDEADYYCATWDDSLSAWVFGGGTKLTVLG

SEQ ID NO: 336 - protein, 8 aa, synthetic construct
  REGION 1..8: note = synthetic
SSNIGSNF

SEQ ID NO: 337 - skipped

SEQ ID NO: 338 - protein, 11 aa, synthetic construct
  REGION 1..11: note = synthetic
ATWDDSLSAWV

SEQ ID NO: 339 - protein, 216 aa, synthetic construct
  REGION 1..216: note = synthetic
QSVLTQPPSVSGTPGQRVTISCSGSSSNIGSNFVYWHQQLTGTAPKLLIYRNTQRPSGVPDRFSGSKSGTSASLAIGGLRSEDEADYYCATWDDSLSAWVFGGGTKLTVLGQPKAAPSVTLFPPSSEELQANKATLVCLISDFYPGAVTVAWKADSSPVKAGVETTTPSKQSNNKYAASSYLSLTPEQWKSHRSYSCQVTHEGSTVEKTVAPTECS

SEQ ID NO: 340 - protein, 119 aa, synthetic construct
  REGION 1..119: note = synthetic
EVQLVETGGGLIQPGGSLRLSCAASGFTVSSNYMSWVRQAPGKGLEWVSVIYSGGSTYYADSVKGRFTISRDNSKNTLYLQMNSLRAEDTAVYYCARGARYSYGQYPYWGQGTLVTVSS

SEQ ID NO: 341 - protein, 8 aa, synthetic construct
  REGION 1..8: note = synthetic
GFTVSSNY

SEQ ID NO: 342 - protein, 7 aa, synthetic construct
  REGION 1..7: note = synthetic
IYSGGST

SEQ ID NO: 343 - protein, 13 aa, synthetic construct
  REGION 1..13: note = synthetic
ARGARYSYGQYPY

SEQ ID NO: 344 - protein, 446 aa, synthetic construct
  REGION 1..446: note = synthetic
EVQLVETGGGLIQPGGSLRLSCAASGFTVSSNYMSWVRQAPGKGLEWVSVIYSGGSTYYADSVKGRFTISRDNSKNTLYLQMNSLRAEDTAVYYCARGARYSYGQYPYWGQGTLVTVSSASTKGPSVFPLAPCSRSTSESTAALGCLVKDYFPEPVTVSWNSGALTSGVHTFPAVLQSSGLYSLSSVVTVPSSSLGTKTYTCNVDHKPSNTKVDKRVESKYGPPCPPCPAPEFLGGPSVFLFPPKPKDTLMISRTPEVTCVVVDVSQEDPEVQFNWYVDGVEVHNAKTKPREEQFNSTYRVVSVLTVLHQDWLNGKEYKCKVSNKGLPSSIEKTISKAKGQPREPQVYTLPPSQEEMTKNQVSLTCLVKGFYPSDIAVEWESNGQPENNYKTTPPVLDSDGSFFLYSRLTVDKSRWQEGNVFSCSVMHEALHNHYTQKSLSLSPGK

SEQ ID NO: 345 - protein, 109 aa, synthetic construct
  REGION 1..109: note = synthetic
DIQLTQSPSFLSASVGDRVTITCRASHDISSLFSWYQQKPGKAPKLLIYAASTLQTGVPSRFSGSASGTEFTLTISSLQPEDFATYYCLQLDSFPTWTFGQGTKVEIKR

SEQ ID NO: 346 - protein, 6 aa, synthetic construct
  REGION 1..6: note = synthetic
HDISSL

SEQ ID NO: 347 - skipped

SEQ ID NO: 348 - protein, 10 aa, synthetic construct
  REGION 1..10: note = synthetic
LQLDSFPTWT

SEQ ID NO: 349 - protein, 215 aa, synthetic construct
  REGION 1..215: note = synthetic
DIQLTQSPSFLSASVGDRVTITCRASHDISSLFSWYQQKPGKAPKLLIYAASTLQTGVPSRFSGSASGTEFTLTISSLQPEDFATYYCLQLDSFPTWTFGQGTKVEIKRTVAAPSVFIFPPSDEQLKSGTASVVCLLNNFYPREAKVQWKVDNALQSGNSQESVTEQDSKDSTYSLSSTLTLSKADYEKHKVYACEVTHQGLSSPVTKSFNRGEC

SEQ ID NO: 350 - protein, 121 aa, synthetic construct; identical to SEQ ID NO: 280
  REGION 1..121: note = synthetic

SEQ ID NO: 351 - protein, 8 aa, synthetic construct
  REGION 1..8: note = synthetic
GFTFSSYA

SEQ ID NO: 352 - protein, 8 aa, synthetic construct
  REGION 1..8: note = synthetic
ISYDGTPV

SEQ ID NO: 353 - protein, 14 aa, synthetic construct
  REGION 1..14: note = synthetic
ARDPLPLHYYGMDV

SEQ ID NO: 354 - protein, 448 aa, synthetic construct
  REGION 1..448: note = synthetic
EVQLVETGGGLIQPGRSLRLSCAASGFTFSSYAMHWVRQAPGKGLEWVAVISYDGTPVYYADSVKGRFTISRDNSKNTLYLQMNSLRAEDTAVYYCARDPLPLHYYGMDVWGQGTTVTVSSASTKGPSVFPLAPCSRSTSESTAALGCLVKDYFPEPVTVSWNSGALTSGVHTFPAVLQSSGLYSLSSVVTVPSSSLGTKTYTCNVDHKPSNTKVDKRVESKYGPPCPPCPAPEFLGGPSVFLFPPKPKDTLMISRTPEVTCVVVDVSQEDPEVQFNWYVDGVEVHNAKTKPREEQFNSTYRVVSVLTVLHQDWLNGKEYKCKVSNKGLPSSIEKTISKAKGQPREPQVYTLPPSQEEMTKNQVSLTCLVKGFYPSDIAVEWESNGQPENNYKTTPPVLDSDGSFFLYSRLTVDKSRWQEGNVFSCSVMHEALHNHYTQKSLSLSPGK

SEQ ID NO: 355 - protein, 111 aa, synthetic construct; identical to SEQ ID NO: 285
  REGION 1..111: note = synthetic

SEQ ID NO: 356 - protein, 8 aa, synthetic construct
  REGION 1..8: note = sythetic
SSNMGRRP

SEQ ID NO: 357 - skipped

SEQ ID NO: 358 - protein, 11 aa, synthetic construct
  REGION 1..11: note = synthetic
AVWDGDRRSLQ

SEQ ID NO: 359 - protein, 216 aa, synthetic construct; identical to SEQ ID NO: 289
  REGION 1..216: note = synthetic

SEQ ID NO: 360 - protein, 121 aa, synthetic construct; identical to SEQ ID NO: 290
  REGION 1..121: note = synthetic

SEQ ID NO: 361 - protein, 8 aa, synthetic construct
  REGION 1..8: note = synthetic
GFTFSSYA

SEQ ID NO: 362 - protein, 8 aa, synthetic construct
  REGION 1..8: note = synthetic
ISYAGEVK

SEQ ID NO: 363 - protein, 14 aa, synthetic construct
  REGION 1..14: note = synthetic
ARDPLPLHYYGMDV

SEQ ID NO: 364 - protein, 448 aa, synthetic construct
  REGION 1..448: note = synthetic
EVQLVETGGGLIQPGRSLRLSCAASGFTFSSYAMHWVRQAPGKGLEWVAVISYAGEVKYYADSVKGRFTISRDNSKNTLYLQMNSLRAEDTAVYYCARDPLPLHYYGMDVWGQGTTVTVSSASTKGPSVFPLAPCSRSTSESTAALGCLVKDYFPEPVTVSWNSGALTSGVHTFPAVLQSSGLYSLSSVVTVPSSSLGTKTYTCNVDHKPSNTKVDKRVESKYGPPCPPCPAPEFLGGPSVFLFPPKPKDTLMISRTPEVTCVVVDVSQEDPEVQFNWYVDGVEVHNAKTKPREEQFNSTYRVVSVLTVLHQDWLNGKEYKCKVSNKGLPSSIEKTISKAKGQPREPQVYTLPPSQEEMTKNQVSLTCLVKGFYPSDIAVEWESNGQPENNYKTTPPVLDSDGSFFLYSRLTVDKSRWQEGNVFSCSVMHEALHNHYTQKSLSLSPGK

SEQ ID NO: 365 - protein, 111 aa, synthetic construct; identical to SEQ ID NO: 295
  REGION 1..111: note = synthetic

SEQ ID NO: 366 - protein, 8 aa, synthetic construct
  REGION 1..8: note = synthetic
SSNMGRRP

SEQ ID NO: 367 - skipped

SEQ ID NO: 368 - protein, 11 aa, synthetic construct
  REGION 1..11: note = synthetic
AVWDDIGRVLQ

SEQ ID NO: 369 - protein, 216 aa, synthetic construct; identical to SEQ ID NO: 299
  REGION 1..216: note = synthetic

SEQ ID NO: 370 - protein, 121 aa, synthetic construct
  REGION 1..121: note = synthetic
EVQLVETGGGLIQPGRSLRLSCAASGFTFSSYAMHWVRQAPGKGLEWVAVISYDRTPVYYADSVKGRFTISRDNSKNTLYLQMNSLRAEDTAVYYCARDPLPLHYYGMDVWGQGTTVTVSS

SEQ ID NO: 371 - protein, 8 aa, synthetic construct
  REGION 1..8: note = synthetic
GFTFSSYA

SEQ ID NO: 372 - protein, 8 aa, synthetic construct
  REGION 1..8: note = synthetic
ISYDRTPV

SEQ ID NO: 373 - protein, 8 aa, synthetic construct
  REGION 1..8: note = synthetic
ISYDRTPV

SEQ ID NO: 374 - protein, 448 aa, synthetic construct
  REGION 1..448: note = synthetic
EVQLVETGGGLIQPGRSLRLSCAASGFTFSSYAMHWVRQAPGKGLEWVAVISYDRTPVYYADSVKGRFTISRDNSKNTLYLQMNSLRAEDTAVYYCARDPLPLHYYGMDVWGQGTTVTVSSASTKGPSVFPLAPCSRSTSESTAALGCLVKDYFPEPVTVSWNSGALTSGVHTFPAVLQSSGLYSLSSVVTVPSSSLGTKTYTCNVDHKPSNTKVDKRVESKYGPPCPPCPAPEFLGGPSVFLFPPKPKDTLMISRTPEVTCVVVDVSQEDPEVQFNWYVDGVEVHNAKTKPREEQFNSTYRVVSVLTVLHQDWLNGKEYKCKVSNKGLPSSIEKTISKAKGQPREPQVYTLPPSQEEMTKNQVSLTCLVKGFYPSDIAVEWESNGQPENNYKTTPPVLDSDGSFFLYSRLTVDKSRWQEGNVFSCSVMHEALHNHYTQKSLSLSPGK

SEQ ID NO: 375 - protein, 111 aa, synthetic construct
  REGION 1..111: note = synthetic
QSALTQPRSASGNPGQRVTISCSGSSSNMGRRPVNWYQQIPGTAPKLLIYSQNQRPSGVPDRFSGSQSGTSASLTISGLQSEDEAEYFCATWDDSLPRLNFGGGTKLAVLG

SEQ ID NO: 376 - protein, 8 aa, synthetic construct
  REGION 1..8: note = synthetic
SSNMGRRP

SEQ ID NO: 377 - skipped

SEQ ID NO: 378 - protein, 11 aa, synthetic construct
  REGION 1..11: note = synthetic
ATWDDSLPRLN

SEQ ID NO: 379 - protein, 216 aa, synthetic construct
  REGION 1..216: note = synthetic
QSALTQPRSASGNPGQRVTISCSGSSSNMGRRPVNWYQQIPGTAPKLLIYSQNQRPSGVPDRFSGSQSGTSASLTISGLQSEDEAEYFCATWDDSLPRLNFGGGTKLAVLGQPKAAPSVTLFPPSSEELQANKATLVCLISDFYPGAVTVAWKADSSPVKAGVETTTPSKQSNNKYAASSYLSLTPEQWKSHRSYSCQVTHEGSTVEKTVAPTECS

SEQ ID NO: 380 - protein, 121 aa, synthetic construct
  REGION 1..121: note = synthetic
EVQLVETGGGLIQPGRSLRLSCAASGFTFSSYAMHWVRQAPGKGLEWVAVISYEGDRKYYADSVKGRFTISRDNSKNTLYLQMNSLRAEDTAVYYCARDPLPLHYYGMDVWGQGTTVTVSS

SEQ ID NO: 381 - protein, 8 aa, synthetic construct
  REGION 1..8: note = synthetic
GFTFSSYA

SEQ ID NO: 382 - protein, 8 aa, synthetic construct
  REGION 1..8: note = synthetic
ISYEGDRK

SEQ ID NO: 383 - protein, 14 aa, synthetic construct
  REGION 1..14: note = synthetic
ARDPLPLHYYGMDV

SEQ ID NO: 384 - protein, 448 aa, synthetic construct
  REGION 1..448: note = synthetic
EVQLVETGGGLIQPGRSLRLSCAASGFTFSSYAMHWVRQAPGKGLEWVAVISYEGDRKYYADSVKGRFTISRDNSKNTLYLQMNSLRAEDTAVYYCARDPLPLHYYGMDVWGQGTTVTVSSASTKGPSVFPLAPCSRSTSESTAALGCLVKDYFPEPVTVSWNSGALTSGVHTFPAVLQSSGLYSLSSVVTVPSSSLGTKTYTCNVDHKPSNTKVDKRVESKYGPPCPPCPAPEFLGGPSVFLFPPKPKDTLMISRTPEVTCVVVDVSQEDPEVQFNWYVDGVEVHNAKTKPREEQFNSTYRVVSVLTVLHQDWLNGKEYKCKVSNKGLPSSIEKTISKAKGQPREPQVYTLPPSQEEMTKNQVSLTCLVKGFYPSDIAVEWESNGQPENNYKTTPPVLDSDGSFFLYSRLTVDKSRWQEGNVFSCSVMHEALHNHYTQKSLSLSPGK

SEQ ID NO: 385 - protein, 111 aa, synthetic construct
  REGION 1..111: note = synthetic
QSALTQPRSASGNPGQRVTISCSGSSSNMGRRPVNWYQQIPGTAPKLLIYSQNQRPSGVPDRFSGSQSGTSASLTISGLQSEDEAEYFCATWDDSTPHGVFGGGTKLAVLG

SEQ ID NO: 386 - protein, 8 aa, synthetic construct
  REGION 1..8: note = synthetic
SSNMGRRP

SEQ ID NO: 387 - skipped

SEQ ID NO: 388 - protein, 11 aa, synthetic construct
  REGION 1..11: note = synthetic
ATWDDSTPHGV

SEQ ID NO: 389 - protein, 216 aa, synthetic construct
  REGION 1..216: note = synthetic
QSALTQPRSASGNPGQRVTISCSGSSSNMGRRPVNWYQQIPGTAPKLLIYSQNQRPSGVPDRFSGSQSGTSASLTISGLQSEDEAEYFCATWDDSTPHGVFGGGTKLAVLGQPKAAPSVTLFPPSSEELQANKATLVCLISDFYPGAVTVAWKADSSPVKAGVETTTPSKQSNNKYAASSYLSLTPEQWKSHRSYSCQVTHEGSTVEKTVAPTECS

SEQ ID NO: 390 - protein, 118 aa, synthetic construct
  REGION 1..118: note = synthetic
EVQLVETGGGLIQPGGSLRLSCAASGFTVSSNYMSWVRQAPGKGLEWVSVIYSGGSTYYADSVKGRFTISRDNSKNTLYLQMNSLRAEDTAVYYCARGAPLFGQYPYWGQGTLVTVSS

SEQ ID NO: 391 - protein, 8 aa, synthetic construct
  REGION 1..8: note = synthetic
GFTVSSNY

SEQ ID NO: 392 - protein, 7 aa, synthetic construct
  REGION 1..7: note = synthetic
IYSGGST

SEQ ID NO: 393 - protein, 12 aa, synthetic construct
  REGION 1..12: note = synthetic
ARGAPLFGQYPY

SEQ ID NO: 394 - protein, 445 aa, synthetic construct
  REGION 1..445: note = synthetic
EVQLVETGGGLIQPGGSLRLSCAASGFTVSSNYMSWVRQAPGKGLEWVSVIYSGGSTYYADSVKGRFTISRDNSKNTLYLQMNSLRAEDTAVYYCARGAPLFGQYPYWGQGTLVTVSSASTKGPSVFPLAPCSRSTSESTAALGCLVKDYFPEPVTVSWNSGALTSGVHTFPAVLQSSGLYSLSSVVTVPSSSLGTKTYTCNVDHKPSNTKVDKRVESKYGPPCPPCPAPEFLGGPSVFLFPPKPKDTLMISRTPEVTCVVVDVSQEDPEVQFNWYVDGVEVHNAKTKPREEQFNSTYRVVSVLTVLHQDWLNGKEYKCKVSNKGLPSSIEKTISKAKGQPREPQVYTLPPSQEEMTKNQVSLTCLVKGFYPSDIAVEWESNGQPENNYKTTPPVLDSDGSFFLYSRLTVDKSRWQEGNVFSCSVMHEALHNHYTQKSLSLSPGK

SEQ ID NO: 395 - protein, 109 aa, synthetic construct
  REGION 1..109: note = synthetic
DIQMTQSPSSLSASVGDRVTITCRASHAIASLFSWYQQKPGKAPKLLIYAASTLQTGVPSRFSGSASGTEFTLTISSLQPEDFATYYCLQLDSFPTWTFGQGTKVEIKR

SEQ ID NO: 396 - protein, 6 aa, synthetic construct
  REGION 1..6: note = synthetic
HAIASL

SEQ ID NO: 397 - skipped

SEQ ID NO: 398 - protein, 10 aa, synthetic construct
  REGION 1..10: note = synthetic
LQLDSFPTWT

SEQ ID NO: 399 - protein, 215 aa, synthetic construct
  REGION 1..215: note = synthetic
DIQMTQSPSSLSASVGDRVTITCRASHAIASLFSWYQQKPGKAPKLLIYAASTLQTGVPSRFSGSASGTEFTLTISSLQPEDFATYYCLQLDSFPTWTFGQGTKVEIKRTVAAPSVFIFPPSDEQLKSGTASVVCLLNNFYPREAKVQWKVDNALQSGNSQESVTEQDSKDSTYSLSSTLTLSKADYEKHKVYACEVTHQGLSSPVTKSFNRGEC

SEQ ID NO: 400 - protein, 118 aa, synthetic construct
  REGION 1..118: note = synthetic
EVQLVETGGGLIQPGGSLRLSCAASGFTVSSNYMSWVRQAPGKGLEWVSVIYSGGSTYYADSVKGRFTISRDNSKNTLYLQMNSLRAEDTAVYYCARGARPNGQYPYWGQGTLVTVSS

SEQ ID NO: 401 - protein, 8 aa, synthetic construct
  REGION 1..8: note = synthetic
GFTVSSNY

SEQ ID NO: 402 - protein, 7 aa, synthetic construct
  REGION 1..7: note = synthetic
IYSGGST

SEQ ID NO: 403 - protein, 12 aa, synthetic construct
  REGION 1..12: note = synthetic
ARGARPNGQYPY

SEQ ID NO: 404 - protein, 445 aa, synthetic construct
  REGION 1..445: note = synthetic
EVQLVETGGGLIQPGGSLRLSCAASGFTVSSNYMSWVRQAPGKGLEWVSVIYSGGSTYYADSVKGRFTISRDNSKNTLYLQMNSLRAEDTAVYYCARGARPNGQYPYWGQGTLVTVSSASTKGPSVFPLAPCSRSTSESTAALGCLVKDYFPEPVTVSWNSGALTSGVHTFPAVLQSSGLYSLSSVVTVPSSSLGTKTYTCNVDHKPSNTKVDKRVESKYGPPCPPCPAPEFLGGPSVFLFPPKPKDTLMISRTPEVTCVVVDVSQEDPEVQFNWYVDGVEVHNAKTKPREEQFNSTYRVVSVLTVLHQDWLNGKEYKCKVSNKGLPSSIEKTISKAKGQPREPQVYTLPPSQEEMTKNQVSLTCLVKGFYPSDIAVEWESNGQPENNYKTTPPVLDSDGSFFLYSRLTVDKSRWQEGNVFSCSVMHEALHNHYTQKSLSLSPGK

SEQ ID NO: 405 - protein, 109 aa, synthetic construct
  REGION 1..109: note = synthetic
DIQLTQSPSFLSASVGDRVTITCRASHGIKSLFSWYQQKPGKAPKLLIYAASTLQTGVPSRFSGSASGTEFTLTISSLQPEDFATYYCLQLDSFPTWTFGQGTKVEIKR

SEQ ID NO: 406 - protein, 6 aa, synthetic construct
  REGION 1..6: note = synthetic
HGIKSL

SEQ ID NO: 407 - skipped

SEQ ID NO: 408 - protein, 10 aa, synthetic construct
  REGION 1..10: note = synthetic
LQLDSFPTWT

SEQ ID NO: 409 - protein, 215 aa, synthetic construct
  REGION 1..215: note = synthetic
DIQLTQSPSFLSASVGDRVTITCRASHGIKSLFSWYQQKPGKAPKLLIYAASTLQTGVPSRFSGSASGTEFTLTISSLQPEDFATYYCLQLDSFPTWTFGQGTKVEIKRTVAAPSVFIFPPSDEQLKSGTASVVCLLNNFYPREAKVQWKVDNALQSGNSQESVTEQDSKDSTYSLSSTLTLSKADYEKHKVYACEVTHQGLSSPVTKSFNRGEC

SEQ ID NO: 410 - protein, 119 aa, synthetic construct
  REGION 1..119: note = synthetic
EVQLQQSGPELVKPGSSVKMSCKASGYTFSSYVMHWVKQKPGQGLEWIGYIDPYNDGAKYNEKFKGKATLTSDKSSSTAYMELSSLTSEDSAVYYCARGGPYGWYFDVWGAGTTVTVSS

SEQ ID NO: 411 - protein, 8 aa, synthetic construct
  REGION 1..8: note = synthetic
GYTFSSYV

SEQ ID NO: 412 - protein, 8 aa, synthetic construct
  REGION 1..8: note = synthetic
IDPYNDGA

SEQ ID NO: 413 - protein, 12 aa, synthetic construct
  REGION 1..12: note = synthetic
ARGGPYGWYFDV

SEQ ID NO: 414 - protein, 446 aa, synthetic construct
  REGION 1..446: note = synthetic
EVQLQQSGPELVKPGSSVKMSCKASGYTFSSYVMHWVKQKPGQGLEWIGYIDPYNDGAKYNEKFKGKATLTSDKSSSTAYMELSSLTSEDSAVYYCARGGPYGWYFDVWGAGTTVTVSSASTKGPSVFPLAPCSRSTSESTAALGCLVKDYFPEPVTVSWNSGALTSGVHTFPAVLQSSGLYSLSSVVTVPSSSLGTKTYTCNVDHKPSNTKVDKRVESKYGPPCPPCPAPEFLGGPSVFLFPPKPKDTLMISRTPEVTCVVVDVSQEDPEVQFNWYVDGVEVHNAKTKPREEQFNSTYRVVSVLTVLHQDWLNGKEYKCKVSNKGLPSSIEKTISKAKGQPREPQVYTLPPSQEEMTKNQVSLTCLVKGFYPSDIAVEWESNGQPENNYKTTPPVLDSDGSFFLYSRLTVDKSRWQEGNVFSCSVMHEALHNHYTQKSLSLSPGK

SEQ ID NO: 415 - protein, 107 aa, synthetic construct
  REGION 1..107: note = synthetic
DIQMTQSPASLSASVGETVTITCRASEHIYSYLSWYQQKQGKSPQLLVYNAKTLAEGVPSRFSGSGSGTQFSLKINSLQPEDFGTYYCQHHFGSPLTFGAGTTLELK

SEQ ID NO: 416 - protein, 6 aa, synthetic construct
  REGION 1..6: note = synthetic
EHIYSY

SEQ ID NO: 417 - skipped

SEQ ID NO: 418 - protein, 9 aa, synthetic construct
  REGION 1..9: note = synthetic
QHHFGSPLT

SEQ ID NO: 419 - protein, 214 aa, synthetic construct
  REGION 1..214: note = synthetic
DIQMTQSPASLSASVGETVTITCRASEHIYSYLSWYQQKQGKSPQLLVYNAKTLAEGVPSRFSGSGSGTQFSLKINSLQPEDFGTYYCQHHFGSPLTFGAGTTLELKRTVAAPSVFIFPPSDEQLKSGTASVVCLLNNFYPREAKVQWKVDNALQSGNSQESVTEQDSKDSTYSLSSTLTLSKADYEKHKVYACEVTHQGLSSPVTKSFNRGEC

SEQ ID NO: 420 - protein, 130 aa, synthetic construct
  REGION 1..130: note = synthetic
QVHLQESGPGLVKPSETLSLTCTVSGGSVSSGIYYWSWIRQPPGKGLEWIGYIYYSGSTNYNPSLKSRVTISVDTSKNQFSLKLSSVTAADTAVYYCARDYYVSGNYYNVDYYFFGVDVWGQGTTVTVSS

SEQ ID NO: 421 - protein, 10 aa, synthetic construct
  REGION 1..10: note = synthetic
GGSVSSGIYY

SEQ ID NO: 422 - protein, 7 aa, synthetic construct
  REGION 1..7: note = synthetic
IYYSGST

SEQ ID NO: 423 - protein, 22 aa, synthetic construct
  REGION 1..22: note = synthetic
ARDYYVSGNYYNVDYYFFGVDV

SEQ ID NO: 424 - protein, 457 aa, synthetic construct
  REGION 1..457: note = synthetic
QVHLQESGPGLVKPSETLSLTCTVSGGSVSSGIYYWSWIRQPPGKGLEWIGYIYYSGSTNYNPSLKSRVTISVDTSKNQFSLKLSSVTAADTAVYYCARDYYVSGNYYNVDYYFFGVDVWGQGTTVTVSSASTKGPSVFPLAPCSRSTSESTAALGCLVKDYFPEPVTVSWNSGALTSGVHTFPAVLQSSGLYSLSSVVTVPSSSLGTKTYTCNVDHKPSNTKVDKRVESKYGPPCPPCPAPEFLGGPSVFLFPPKPKDTLMISRTPEVTCVVVDVSQEDPEVQFNWYVDGVEVHNAKTKPREEQFNSTYRVVSVLTVLHQDWLNGKEYKCKVSNKGLPSSIEKTISKAKGQPREPQVYTLPPSQEEMTKNQVSLTCLVKGFYPSDIAVEWESNGQPENNYKTTPPVLDSDGSFFLYSRLTVDKSRWQEGNVFSCSVMHEALHNHYTQKSLSLSPGK

SEQ ID NO: 425 - protein, 109 aa, synthetic construct
  REGION 1..109: note = synthetic
EIVLTQSPATLSLSPGERATLSCRASQSVSSYLAWYQQKPGQAPRLLIYDASNRATGIPARFSGSGSGTDFTLTISSLEPEDFAVYYCQQRSNWPPLFTFGPGTKVDIK

SEQ ID NO: 426 - protein, 6 aa, synthetic construct
  REGION 1..6: note = synthetic
QSVSSY

SEQ ID NO: 427 - skipped

SEQ ID NO: 428 - protein, 11 aa, synthetic construct
  REGION 1..11: note = synthetic
QQRSNWPPLFT

SEQ ID NO: 429 - protein, 216 aa, synthetic construct
  REGION 1..216: note = synthetic
EIVLTQSPATLSLSPGERATLSCRASQSVSSYLAWYQQKPGQAPRLLIYDASNRATGIPARFSGSGSGTDFTLTISSLEPEDFAVYYCQQRSNWPPLFTFGPGTKVDIKRTVAAPSVFIFPPSDEQLKSGTASVVCLLNNFYPREAKVQWKVDNALQSGNSQESVTEQDSKDSTYSLSSTLTLSKADYEKHKVYACEVTHQGLSSPVTKSFNRGEC

SEQ ID NO: 430 - protein, 119 aa, synthetic construct
  REGION 1..119: note = synthetic
QVQLVQSGAEVKKPGASVKVSCKASGYTFTEYTLHWVRQAPGQGLEWMGGINPNNGGTSYAQKFQGRVTMTRDTSTSTVYMELSSLRSEDTAVYYCARSGYYDYSFAYWGQGTLVTVSS

SEQ ID NO: 431 - protein, 10 aa, synthetic construct
  REGION 1..10: note = synthetic
GYTFTEYTLH

SEQ ID NO: 432 - protein, 10 aa, synthetic construct
  REGION 1..10: note = synthetic
GINPNNGGTS

SEQ ID NO: 433 - protein, 10 aa, synthetic construct
  REGION 1..10: note = synthetic
SGYYDYSFAY

SEQ ID NO: 434 - protein, 446 aa, synthetic construct
  REGION 1..446: note = synthetic
QVQLVQSGAEVKKPGASVKVSCKASGYTFTEYTLHWVRQAPGQGLEWMGGINPNNGGTSYAQKFQGRVTMTRDTSTSTVYMELSSLRSEDTAVYYCARSGYYDYSFAYWGQGTLVTVSSASTKGPSVFPLAPCSRSTSESTAALGCLVKDYFPEPVTVSWNSGALTSGVHTFPAVLQSSGLYSLSSVVTVPSSSLGTKTYTCNVDHKPSNTKVDKRVESKYGPPCPPCPAPEFLGGPSVFLFPPKPKDTLMISRTPEVTCVVVDVSQEDPEVQFNWYVDGVEVHNAKTKPREEQFNSTYRVVSVLTVLHQDWLNGKEYKCKVSNKGLPSSIEKTISKAKGQPREPQVYTLPPSQEEMTKNQVSLTCLVKGFYPSDIAVEWESNGQPENNYKTTPPVLDSDGSFFLYSRLTVDKSRWQEGNVFSCSVMHEALHNHYTQKSLSLSPGK

SEQ ID NO: 435 - protein, 107 aa, synthetic construct
  REGION 1..107: note = synthetic
DIQMTQSPSSLSASVGDRVTITCRASQDVKNAVVWYQQKPGKAPKLLIYSPSYRYTGVPSRFSGSGSGTDFTLTISSLQPEDFATYYCQQHYSTPFTFGQGTKLEIK

SEQ ID NO: 436 - protein, 11 aa, synthetic construct
  REGION 1..11: note = synthetic
RASQDVKNAVV

SEQ ID NO: 437 - protein, 7 aa, synthetic construct
  REGION 1..7: note = synthetic
SPSYRYT

SEQ ID NO: 438 - protein, 9 aa, synthetic construct
  REGION 1..9: note = synthetic
QQHYSTPFT

SEQ ID NO: 439 - protein, 214 aa, synthetic construct
  REGION 1..214: note = synthetic
DIQMTQSPSSLSASVGDRVTITCRASQDVKNAVVWYQQKPGKAPKLLIYSPSYRYTGVPSRFSGSGSGTDFTLTISSLQPEDFATYYCQQHYSTPFTFGQGTKLEIKRTVAAPSVFIFPPSDEQLKSGTASVVCLLNNFYPREAKVQWKVDNALQSGNSQESVTEQDSKDSTYSLSSTLTLSKADYEKHKVYACEVTHQGLSSPVTKSFNRGEC

SEQ ID NO: 440 - protein, 119 aa, synthetic construct
  REGION 1..119: note = synthetic
QVQLVQSGAEVKKPGASVKVSCKTSGYTFTEYTLHWVRQAPGQGLEWIGGINPNNGGTSYAQKFQGRVTMTVDTSTSTVYMELSSLRSEDTAVYYCAGSGYYDYSFAYWGQGTLVTVSS

SEQ ID NO: 441 - protein, 10 aa, synthetic construct
  REGION 1..10: note = synthetic
GYTFTEYTLH

SEQ ID NO: 442 - protein, 10 aa, synthetic construct
  REGION 1..10: note = synthetic
GINPNNGGTS

SEQ ID NO: 443 - protein, 10 aa, synthetic construct
  REGION 1..10: note = synthetic
SGYYDYSFAY

SEQ ID NO: 444 - protein, 446 aa, synthetic construct
  REGION 1..446: note = synthetic
QVQLVQSGAEVKKPGASVKVSCKTSGYTFTEYTLHWVRQAPGQGLEWIGGINPNNGGTSYAQKFQGRVTMTVDTSTSTVYMELSSLRSEDTAVYYCAGSGYYDYSFAYWGQGTLVTVSSASTKGPSVFPLAPCSRSTSESTAALGCLVKDYFPEPVTVSWNSGALTSGVHTFPAVLQSSGLYSLSSVVTVPSSSLGTKTYTCNVDHKPSNTKVDKRVESKYGPPCPPCPAPEFLGGPSVFLFPPKPKDTLMISRTPEVTCVVVDVSQEDPEVQFNWYVDGVEVHNAKTKPREEQFNSTYRVVSVLTVLHQDWLNGKEYKCKVSNKGLPSSIEKTISKAKGQPREPQVYTLPPSQEEMTKNQVSLTCLVKGFYPSDIAVEWESNGQPENNYKTTPPVLDSDGSFFLYSRLTVDKSRWQEGNVFSCSVMHEALHNHYTQKSLSLSPGK

SEQ ID NO: 445 - protein, 107 aa, synthetic construct; identical to SEQ ID NO: 435
  REGION 1..107: note = synthetic

SEQ ID NO: 446 - protein, 11 aa, synthetic construct
  REGION 1..11: note = synthetic
RASQDVKNAVV

SEQ ID NO: 447 - protein, 7 aa, synthetic construct
  REGION 1..7: note = synthetic
SPSYRYT

SEQ ID NO: 448 - protein, 9 aa, synthetic construct
  REGION 1..9: note = synthetic
QQHYSTPFT

SEQ ID NO: 449 - protein, 214 aa, synthetic construct; identical to SEQ ID NO: 439
  REGION 1..214: note = synthetic

SEQ ID NO: 450 - protein, 119 aa, synthetic construct; identical to SEQ ID NO: 440
  REGION 1..119: note = synthetic

SEQ ID NO: 451 - protein, 10 aa, synthetic construct
  REGION 1..10: note = synthetic
GYTFTEYTLH

SEQ ID NO: 452 - protein, 10 aa, synthetic construct
  REGION 1..10: note = synthetic
GINPNNGGTS

SEQ ID NO: 453 - protein, 10 aa, synthetic construct
  REGION 1..10: note = synthetic
SGYYDYSFAY

SEQ ID NO: 454 - protein, 446 aa, synthetic construct; identical to SEQ ID NO: 444
  REGION 1..446: note = synthetic

SEQ ID NO: 455 - protein, 107 aa, synthetic construct
  REGION 1..107: note = synthetic
DIQMTQSPSSLSASVGDRVTITCRASQDVKNAVVWYQQKPGKAPKLLIYSPSYRYTGVPSRFSGSGSGTDFTFTISSVQPEDFATYYCQQHYSTPFTFGQGTKLEIK

SEQ ID NO: 456 - protein, 11 aa, synthetic construct
  REGION 1..11: note = synthetic
RASQDVKNAVV

SEQ ID NO: 457 - protein, 7 aa, synthetic construct
  REGION 1..7: note = synthetic
SPSYRYT

SEQ ID NO: 458 - protein, 9 aa, synthetic construct
  REGION 1..9: note = synthetic
QQHYSTPFT

SEQ ID NO: 459 - protein, 214 aa, synthetic construct
  REGION 1..214: note = synthetic
DIQMTQSPSSLSASVGDRVTITCRASQDVKNAVVWYQQKPGKAPKLLIYSPSYRYTGVPSRFSGSGSGTDFTFTISSVQPEDFATYYCQQHYSTPFTFGQGTKLEIKRTVAAPSVFIFPPSDEQLKSGTASVVCLLNNFYPREAKVQWKVDNALQSGNSQESVTEQDSKDSTYSLSSTLTLSKADYEKHKVYACEVTHQGLSSPVTKSFNRGEC

SEQ ID NO: 460 - protein, 119 aa, synthetic construct
  REGION 1..119: note = synthetic
QVQLVQSGAEVKKPGASVKISCKTSGYTFTEYTLHWVRQAPGQGLEWIGGINPNNGGTSYAQKFQGRATLTVDTSTSTAYMELSSLRSEDTAVYYCAGSGYYDYSFAYWGQGTLVTVSS

SEQ ID NO: 461 - protein, 10 aa, synthetic construct
  REGION 1..10: note = synthetic
GYTFTEYTLH

SEQ ID NO: 462 - protein, 10 aa, synthetic construct
  REGION 1..10: note = synthetic
GINPNNGGTS

SEQ ID NO: 463 - protein, 10 aa, synthetic construct
  REGION 1..10: note = synthetic
SGYYDYSFAY

SEQ ID NO: 464 - protein, 446 aa, synthetic construct
  REGION 1..446: note = synthetic
QVQLVQSGAEVKKPGASVKISCKTSGYTFTEYTLHWVRQAPGQGLEWIGGINPNNGGTSYAQKFQGRATLTVDTSTSTAYMELSSLRSEDTAVYYCAGSGYYDYSFAYWGQGTLVTVSSASTKGPSVFPLAPCSRSTSESTAALGCLVKDYFPEPVTVSWNSGALTSGVHTFPAVLQSSGLYSLSSVVTVPSSSLGTKTYTCNVDHKPSNTKVDKRVESKYGPPCPPCPAPEFLGGPSVFLFPPKPKDTLMISRTPEVTCVVVDVSQEDPEVQFNWYVDGVEVHNAKTKPREEQFNSTYRVVSVLTVLHQDWLNGKEYKCKVSNKGLPSSIEKTISKAKGQPREPQVYTLPPSQEEMTKNQVSLTCLVKGFYPSDIAVEWESNGQPENNYKTTPPVLDSDGSFFLYSRLTVDKSRWQEGNVFSCSVMHEALHNHYTQKSLSLSPGK

SEQ ID NO: 465 - protein, 107 aa, synthetic construct; identical to SEQ ID NO: 435
  REGION 1..107: note = synthetic

SEQ ID NO: 466 - protein, 11 aa, synthetic construct
  REGION 1..11: note = synthetic
RASQDVKNAVV

SEQ ID NO: 467 - protein, 7 aa, synthetic construct
  REGION 1..7: note = synthetic
SPSYRYT

SEQ ID NO: 468 - protein, 9 aa, synthetic construct
  REGION 1..9: note = synthetic
QQHYSTPFT

SEQ ID NO: 469 - protein, 214 aa, synthetic construct; identical to SEQ ID NO: 439
  REGION 1..214: note = synthetic

SEQ ID NO: 470 - protein, 119 aa, synthetic construct; identical to SEQ ID NO: 460
  REGION 1..119: note = synthetic

SEQ ID NO: 471 - protein, 10 aa, synthetic construct
  REGION 1..10: note = synthetic
GYTFTEYTLH

SEQ ID NO: 472 - protein, 10 aa, synthetic construct
  REGION 1..10: note = synthetic
GINPNNGGTS

SEQ ID NO: 473 - protein, 10 aa, synthetic construct
  REGION 1..10: note = synthetic
SGYYDYSFAY

SEQ ID NO: 474 - protein, 446 aa, synthetic construct; identical to SEQ ID NO: 464
  REGION 1..446: note = synthetic

SEQ ID NO: 475 - protein, 107 aa, synthetic construct; identical to SEQ ID NO: 455
  REGION 1..107: note = synthetic

SEQ ID NO: 476 - protein, 11 aa, synthetic construct
  REGION 1..11: note = synthetic
RASQDVKNAVV

SEQ ID NO: 477 - protein, 7 aa, synthetic construct
  REGION 1..7: note = synthetic
SPSYRYT

SEQ ID NO: 478 - protein, 9 aa, synthetic construct
  REGION 1..9: note = synthetic
QQHYSTPFT

SEQ ID NO: 479 - protein, 214 aa, synthetic construct; identical to SEQ ID NO: 459
  REGION 1..214: note = synthetic

SEQ ID NO: 480 - protein, 119 aa, synthetic construct
  REGION 1..119: note = synthetic
QVQLVQSGAEVKKPGASVKISCKTSGYTFTEYTLHWVRQAPGQGLEWIGGINPNNGGTSYAQKFQGRATLTVDKSTSTAYMELSSLRSEDTAVYYCAGSGYYDYSFAYWGQGTLVTVSS

SEQ ID NO: 481 - protein, 10 aa, synthetic construct
  REGION 1..10: note = synthetic
GYTFTEYTLH

SEQ ID NO: 482 - protein, 10 aa, synthetic construct
  REGION 1..10: note = synthetic
GINPNNGGTS

SEQ ID NO: 483 - protein, 10 aa, synthetic construct
  REGION 1..10: note = synthetic
SGYYDYSFAY

SEQ ID NO: 484 - protein, 446 aa, synthetic construct
  REGION 1..446: note = synthetic
QVQLVQSGAEVKKPGASVKISCKTSGYTFTEYTLHWVRQAPGQGLEWIGGINPNNGGTSYAQKFQGRATLTVDKSTSTAYMELSSLRSEDTAVYYCAGSGYYDYSFAYWGQGTLVTVSSASTKGPSVFPLAPCSRSTSESTAALGCLVKDYFPEPVTVSWNSGALTSGVHTFPAVLQSSGLYSLSSVVTVPSSSLGTKTYTCNVDHKPSNTKVDKRVESKYGPPCPPCPAPEFLGGPSVFLFPPKPKDTLMISRTPEVTCVVVDVSQEDPEVQFNWYVDGVEVHNAKTKPREEQFNSTYRVVSVLTVLHQDWLNGKEYKCKVSNKGLPSSIEKTISKAKGQPREPQVYTLPPSQEEMTKNQVSLTCLVKGFYPSDIAVEWESNGQPENNYKTTPPVLDSDGSFFLYSRLTVDKSRWQEGNVFSCSVMHEALHNHYTQKSLSLSPGK

SEQ ID NO: 485 - protein, 107 aa, synthetic construct; identical to SEQ ID NO: 435
  REGION 1..107: note = synthetic

SEQ ID NO: 486 - protein, 11 aa, synthetic construct
  REGION 1..11: note = synthetic
RASQDVKNAVV

SEQ ID NO: 487 - protein, 7 aa, synthetic construct
  REGION 1..7: note = synthetic
SPSYRYT

SEQ ID NO: 488 - protein, 9 aa, synthetic construct
  REGION 1..9: note = synthetic
QQHYSTPFT

SEQ ID NO: 489 - protein, 214 aa, synthetic construct; identical to SEQ ID NO: 439
  REGION 1..214: note = synthetic

SEQ ID NO: 490 - protein, 119 aa, synthetic construct; identical to SEQ ID NO: 480
  REGION 1..119: note = synthetic

SEQ ID NO: 491 - protein, 10 aa, synthetic construct
  REGION 1..10: note = synthetic
GYTFTEYTLH

SEQ ID NO: 492 - protein, 10 aa, synthetic construct
  REGION 1..10: note = synthetic
GINPNNGGTS

SEQ ID NO: 493 - protein, 10 aa, synthetic construct
  REGION 1..10: note = synthetic
SGYYDYSFAY

SEQ ID NO: 494 - protein, 446 aa, synthetic construct; identical to SEQ ID NO: 484
  REGION 1..446: note = synthetic

SEQ ID NO: 495 - protein, 107 aa, synthetic construct; identical to SEQ ID NO: 455
  REGION 1..107: note = synthetic

SEQ ID NO: 496 - protein, 11 aa, synthetic construct
  REGION 1..11: note = synthetic
RASQDVKNAVV

SEQ ID NO: 497 - protein, 7 aa, synthetic construct
  REGION 1..7: note = synthetic
SPSYRYT

SEQ ID NO: 498 - protein, 9 aa, synthetic construct
  REGION 1..9: note = synthetic
QQHYSTPFT

SEQ ID NO: 499 - protein, 214 aa, synthetic construct; identical to SEQ ID NO: 459
  REGION 1..214: note = synthetic

SEQ ID NO: 500 - protein, 119 aa, synthetic construct
  REGION 1..119: note = SYNTHETIC
QVQLVQSGAEVKKPGASVKVSCKASGYTFTNYGMNWVRQAPGQGLEWMGWINTYTGEPTYAQKFQGRVTMTRDTSTSTVYMELSSLRSEDTAVYYCARGNGYYVGMDYWGQGTLVTVSS

SEQ ID NO: 501 - protein, 10 aa, synthetic construct
  REGION 1..10: note = synthetic
GYTFTNYGMN

SEQ ID NO: 502 - protein, 10 aa, synthetic construct
  REGION 1..10: note = synthetic
WINTYTGEPT

SEQ ID NO: 503 - protein, 10 aa, synthetic construct
  REGION 1..10: note = synthetic
GNGYYVGMDY

SEQ ID NO: 504 - protein, 446 aa, synthetic construct
  REGION 1..446: note = synthetic
QVQLVQSGAEVKKPGASVKVSCKASGYTFTNYGMNWVRQAPGQGLEWMGWINTYTGEPTYAQKFQGRVTMTRDTSTSTVYMELSSLRSEDTAVYYCARGNGYYVGMDYWGQGTLVTVSSASTKGPSVFPLAPCSRSTSESTAALGCLVKDYFPEPVTVSWNSGALTSGVHTFPAVLQSSGLYSLSSVVTVPSSSLGTKTYTCNVDHKPSNTKVDKRVESKYGPPCPPCPAPEFLGGPSVFLFPPKPKDTLMISRTPEVTCVVVDVSQEDPEVQFNWYVDGVEVHNAKTKPREEQFNSTYRVVSVLTVLHQDWLNGKEYKCKVSNKGLPSSIEKTISKAKGQPREPQVYTLPPSQEEMTKNQVSLTCLVKGFYPSDIAVEWESNGQPENNYKTTPPVLDSDGSFFLYSRLTVDKSRWQEGNVFSCSVMHEALHNHYTQKSLSLSPGK

SEQ ID NO: 505 - protein, 109 aa, synthetic construct
  REGION 1..109: note = synthetic
QAVVTQEPSLTVSPGGTVTLTCRSSTGAVTTSNHANWFQQKPGQAPRTLIYGTNGRGSWTPARFSGSLLGGKAALTLSGAQPEDEAEYYCALWFSNHWVFGGGTKLTVL

SEQ ID NO: 506 - protein, 14 aa, synthetic construct
  REGION 1..14: note = synthetic
RSSTGAVTTSNHAN

SEQ ID NO: 507 - protein, 7 aa, synthetic construct
  REGION 1..7: note = synthetic
GTNGRGS

SEQ ID NO: 508 - protein, 9 aa, synthetic construct
  REGION 1..9: note = synthetic
ALWFSNHWV

SEQ ID NO: 509 - protein, 214 aa, synthetic construct
  REGION 1..214: note = synthetic
QAVVTQEPSLTVSPGGTVTLTCRSSTGAVTTSNHANWFQQKPGQAPRTLIYGTNGRGSWTPARFSGSLLGGKAALTLSGAQPEDEAEYYCALWFSNHWVFGGGTKLTVLQPKAAPSVTLFPPSSEELQANKATLVCLISDFYPGAVTVAWKADSSPVKAGVETTTPSKQSNNKYAASSYLSLTPEQWKSHRSYSCQVTHEGSTVEKTVAPTECS

SEQ ID NO: 510 - protein, 119 aa, synthetic construct
  REGION 1..119: note = synthetic
QVQLVQSGAEVKKPGASVKVSCKASGYTFTNYGMNWVRQAPGQGLEWMGWINTYTGEPTYAQKFQGRVTMTLDTSTSTAYMELSSLRSEDTAVYYCSRGNGYYVGMDYWGQGTLVTVSS

SEQ ID NO: 511 - protein, 10 aa, synthetic construct
  REGION 1..10: note = synthetic
GYTFTNYGMN

SEQ ID NO: 512 - protein, 10 aa, synthetic construct
  REGION 1..10: note = synthetic
WINTYTGEPT

SEQ ID NO: 513 - protein, 10 aa, synthetic construct
  REGION 1..10: note = synthetic
GNGYYVGMDY

SEQ ID NO: 514 - protein, 446 aa, synthetic construct
  REGION 1..446: note = synthetic
QVQLVQSGAEVKKPGASVKVSCKASGYTFTNYGMNWVRQAPGQGLEWMGWINTYTGEPTYAQKFQGRVTMTLDTSTSTAYMELSSLRSEDTAVYYCSRGNGYYVGMDYWGQGTLVTVSSASTKGPSVFPLAPCSRSTSESTAALGCLVKDYFPEPVTVSWNSGALTSGVHTFPAVLQSSGLYSLSSVVTVPSSSLGTKTYTCNVDHKPSNTKVDKRVESKYGPPCPPCPAPEFLGGPSVFLFPPKPKDTLMISRTPEVTCVVVDVSQEDPEVQFNWYVDGVEVHNAKTKPREEQFNSTYRVVSVLTVLHQDWLNGKEYKCKVSNKGLPSSIEKTISKAKGQPREPQVYTLPPSQEEMTKNQVSLTCLVKGFYPSDIAVEWESNGQPENNYKTTPPVLDSDGSFFLYSRLTVDKSRWQEGNVFSCSVMHEALHNHYTQKSLSLSPGK

SEQ ID NO: 515 - protein, 109 aa, synthetic construct
  REGION 1..109: note = synthetic
QAVVTQEPSLTVSPGGTVTLTCGSSTGAVTTSNHANWVQQKPGQAFRGLIRGTNGRGSWTPARFSGSLLGGKAALTISGAQPEDEAEYYCALWFSNHWVFGGGTKLTVL

SEQ ID NO: 516 - protein, 14 aa, synthetic construct
  REGION 1..14: note = synthetic
GSSTGAVTTSNHAN

SEQ ID NO: 517 - protein, 7 aa, synthetic construct
  REGION 1..7: note = synthetic
GTNGRGS

SEQ ID NO: 518 - protein, 9 aa, synthetic construct
  REGION 1..9: note = synthetic
ALWFSNHWV

SEQ ID NO: 519 - protein, 214 aa, synthetic construct
  REGION 1..214: note = synthetic
QAVVTQEPSLTVSPGGTVTLTCGSSTGAVTTSNHANWVQQKPGQAFRGLIRGTNGRGSWTPARFSGSLLGGKAALTISGAQPEDEAEYYCALWFSNHWVFGGGTKLTVLQPKAAPSVTLFPPSSEELQANKATLVCLISDFYPGAVTVAWKADSSPVKAGVETTTPSKQSNNKYAASSYLSLTPEQWKSHRSYSCQVTHEGSTVEKTVAPTECS

SEQ ID NO: 520 - protein, 119 aa, synthetic construct; identical to SEQ ID NO: 510
  REGION 1..119: note = synthetic

SEQ ID NO: 521 - protein, 10 aa, synthetic construct
  REGION 1..10: note = synthetic
GYTFTNYGMN

SEQ ID NO: 522 - protein, 10 aa, synthetic construct
  REGION 1..10: note = synthetic
WINTYTGEPT

SEQ ID NO: 523 - protein, 10 aa, synthetic construct
  REGION 1..10: note = synthetic
GNGYYVGMDY

SEQ ID NO: 524 - protein, 446 aa, synthetic construct; identical to SEQ ID NO: 514
  REGION 1..446: note = synthetic

SEQ ID NO: 525 - protein, 109 aa, synthetic construct
  REGION 1..109: note = synthetic
QAVVTQEPSLTVSPGGTVTLTCGSSTGAVTTSNHANWVQQKPGQAFRGLIRGTNGRGSGVPARFSGSLLGGKAALTISGAQPEDEAEYYCALWFSNHWVFGGGTKLTVL

SEQ ID NO: 526 - protein, 14 aa, synthetic construct
  REGION 1..14: note = synthetic
GSSTGAVTTSNHAN

SEQ ID NO: 527 - protein, 7 aa, synthetic construct
  REGION 1..7: note = synthetic
GTNGRGS

SEQ ID NO: 528 - protein, 9 aa, synthetic construct
  REGION 1..9: note = synthetic
ALWFSNHWV

SEQ ID NO: 529 - protein, 214 aa, synthetic construct
  REGION 1..214: note = synthetic
QAVVTQEPSLTVSPGGTVTLTCGSSTGAVTTSNHANWVQQKPGQAFRGLIRGTNGRGSGVPARFSGSLLGGKAALTISGAQPEDEAEYYCALWFSNHWVFGGGTKLTVLQPKAAPSVTLFPPSSEELQANKATLVCLISDFYPGAVTVAWKADSSPVKAGVETTTPSKQSNNKYAASSYLSLTPEQWKSHRSYSCQVTHEGSTVEKTVAPTECS

SEQ ID NO: 530 - protein, 119 aa, synthetic construct
  REGION 1..119: note = synthetic
QVQLVQSGAEVKKPGASVKISCKASGYTFTNYGMNWVRQAPGQGLEWMGWINTYTGEPTYAQKFQGRFTFTLDTSTSTAYLEISSLRSEDTAVYYCSRGNGYYVGMDYWGQGTLVTVSS

SEQ ID NO: 531 - protein, 10 aa, synthetic construct
  REGION 1..10: note = synthetic
GYTFTNYGMN

SEQ ID NO: 532 - protein, 10 aa, synthetic construct
  REGION 1..10: note = synthetic
WINTYTGEPT

SEQ ID NO: 533 - protein, 10 aa, synthetic construct
  REGION 1..10: note = synthetic
GNGYYVGMDY

SEQ ID NO: 534 - protein, 446 aa, synthetic construct
  REGION 1..446: note = synthetic
QVQLVQSGAEVKKPGASVKISCKASGYTFTNYGMNWVRQAPGQGLEWMGWINTYTGEPTYAQKFQGRFTFTLDTSTSTAYLEISSLRSEDTAVYYCSRGNGYYVGMDYWGQGTLVTVSSASTKGPSVFPLAPCSRSTSESTAALGCLVKDYFPEPVTVSWNSGALTSGVHTFPAVLQSSGLYSLSSVVTVPSSSLGTKTYTCNVDHKPSNTKVDKRVESKYGPPCPPCPAPEFLGGPSVFLFPPKPKDTLMISRTPEVTCVVVDVSQEDPEVQFNWYVDGVEVHNAKTKPREEQFNSTYRVVSVLTVLHQDWLNGKEYKCKVSNKGLPSSIEKTISKAKGQPREPQVYTLPPSQEEMTKNQVSLTCLVKGFYPSDIAVEWESNGQPENNYKTTPPVLDSDGSFFLYSRLTVDKSRWQEGNVFSCSVMHEALHNHYTQKSLSLSPGK

SEQ ID NO: 535 - protein, 109 aa, synthetic construct; identical to SEQ ID NO: 515
  REGION 1..109: note = synthetic

SEQ ID NO: 536 - protein, 14 aa, synthetic construct
  REGION 1..14: note = synthetic
GSSTGAVTTSNHAN

SEQ ID NO: 537 - protein, 7 aa, synthetic construct
  REGION 1..7: note = synthetic
GTNGRGS

SEQ ID NO: 538 - protein, 9 aa, synthetic construct
  REGION 1..9: note = synthetic
ALWFSNHWV

SEQ ID NO: 539 - protein, 214 aa, synthetic construct; identical to SEQ ID NO: 519
  REGION 1..214: note = synthetic

SEQ ID NO: 540 - protein, 119 aa, synthetic construct; identical to SEQ ID NO: 530
  REGION 1..119: note = synthetic

SEQ ID NO: 541 - protein, 10 aa, synthetic construct
  REGION 1..10: note = synthetic
GYTFTNYGMN

SEQ ID NO: 542 - protein, 10 aa, synthetic construct
  REGION 1..10: note = synthetic
WINTYTGEPT

SEQ ID NO: 543 - protein, 10 aa, synthetic construct
  REGION 1..10: note = synthetic
GNGYYVGMDY

SEQ ID NO: 544 - protein, 446 aa, synthetic construct; identical to SEQ ID NO: 534
  REGION 1..446: note = synthetic

SEQ ID NO: 545 - protein, 109 aa, synthetic construct; identical to SEQ ID NO: 525
  REGION 1..109: note = synthetic

SEQ ID NO: 546 - protein, 14 aa, synthetic construct
  REGION 1..14: note = synthetic
GSSTGAVTTSNHAN

SEQ ID NO: 547 - protein, 7 aa, synthetic construct
  REGION 1..7: note = synthetic
GTNGRGS

SEQ ID NO: 548 - protein, 9 aa, synthetic construct
  REGION 1..9: note = synthetic
ALWFSNHWV

SEQ ID NO: 549 - protein, 214 aa, synthetic construct; identical to SEQ ID NO: 529
  REGION 1..214: note = synthetic

SEQ ID NO: 550 - protein, 119 aa, synthetic construct
  REGION 1..119: note = synthetic
QVQLVQSGAEVKKPGASVKISCKASGYTFTNYGMNWVRQAPGQGLEWMGWINTYTGEPTYAQKFQGRFTFTLDASTSTAYLEISSLRSEDTAVYYCSRGNGYYVGMDYWGQGTLVTVSS

SEQ ID NO: 551 - protein, 10 aa, synthetic construct
  REGION 1..10: note = synthetic
GYTFTNYGMN

SEQ ID NO: 552 - protein, 10 aa, synthetic construct
  REGION 1..10: note = synthetic
WINTYTGEPT

SEQ ID NO: 553 - protein, 10 aa, synthetic construct
  REGION 1..10: note = synthetic
GNGYYVGMDY

SEQ ID NO: 554 - protein, 446 aa, synthetic construct; identical to SEQ ID NO: 534
  REGION 1..446: note = synthetic

SEQ ID NO: 555 - protein, 109 aa, synthetic construct; identical to SEQ ID NO: 515
  REGION 1..109: note = synthetic

SEQ ID NO: 556 - protein, 14 aa, synthetic construct
  REGION 1..14: note = synthetic
GSSTGAVTTSNHAN

SEQ ID NO: 557 - protein, 7 aa, synthetic construct
  REGION 1..7: note = synthetic
GTNGRGS

SEQ ID NO: 558 - protein, 9 aa, synthetic construct
  REGION 1..9: note = synthetic
ALWFSNHWV

SEQ ID NO: 559 - protein, 214 aa, synthetic construct; identical to SEQ ID NO: 519
  REGION 1..214: note = synthetic

SEQ ID NO: 560 - protein, 119 aa, synthetic construct; identical to SEQ ID NO: 550
  REGION 1..119: note = synthetic

SEQ ID NO: 561 - protein, 10 aa, synthetic construct
  REGION 1..10: note = synthetic
GYTFTNYGMN

SEQ ID NO: 562 - protein, 10 aa, synthetic construct
  REGION 1..10: note = synthetic
WINTYTGEPT

SEQ ID NO: 563 - protein, 10 aa, synthetic construct
  REGION 1..10: note = synthetic
GNGYYVGMDY

SEQ ID NO: 564 - protein, 446 aa, synthetic construct
  REGION 1..446: note = synthetic
QVQLVQSGAEVKKPGASVKISCKASGYTFTNYGMNWVRQAPGQGLEWMGWINTYTGEPTYAQKFQGRFTFTLDASTSTAYLEISSLRSEDTAVYYCSRGNGYYVGMDYWGQGTLVTVSSASTKGPSVFPLAPCSRSTSESTAALGCLVKDYFPEPVTVSWNSGALTSGVHTFPAVLQSSGLYSLSSVVTVPSSSLGTKTYTCNVDHKPSNTKVDKRVESKYGPPCPPCPAPEFLGGPSVFLFPPKPKDTLMISRTPEVTCVVVDVSQEDPEVQFNWYVDGVEVHNAKTKPREEQFNSTYRVVSVLTVLHQDWLNGKEYKCKVSNKGLPSSIEKTISKAKGQPREPQVYTLPPSQEEMTKNQVSLTCLVKGFYPSDIAVEWESNGQPENNYKTTPPVLDSDGSFFLYSRLTVDKSRWQEGNVFSCSVMHEALHNHYTQKSLSLSPGK

SEQ ID NO: 565 - protein, 109 aa, synthetic construct; identical to SEQ ID NO: 525
  REGION 1..109: note = synthetic

SEQ ID NO: 566 - protein, 14 aa, synthetic construct
  REGION 1..14: note = synthetic
GSSTGAVTTSNHAN

SEQ ID NO: 567 - protein, 7 aa, synthetic construct
  REGION 1..7: note = synthetic
GTNGRGS

SEQ ID NO: 568 - protein, 9 aa, synthetic construct
  REGION 1..9: note = synthetic
ALWFSNHWV

SEQ ID NO: 569 - protein, 214 aa, synthetic construct; identical to SEQ ID NO: 529
  REGION 1..214: note = synthetic

SEQ ID NO: 570 - protein, 119 aa, synthetic construct
  REGION 1..119: note = synthetic
EVQLVESGGGLVQPGGSLRLSCAASGFTFSSYIMSWVRQAPGKGLEWVSTISGGGTNTYYADSVKGRFTISRDNSKNTLYLQMNSLRAEDTAVYYCARWLLSYYAMDYWGQGTLVTVSS

SEQ ID NO: 571 - protein, 10 aa, synthetic construct
  REGION 1..10: note = synthetic
GFTFSSYIMS

SEQ ID NO: 572 - protein, 10 aa, synthetic construct
  REGION 1..10: note = synthetic
TISGGGTNTY

SEQ ID NO: 573 - protein, 10 aa, synthetic construct
  REGION 1..10: note = synthetic
WLLSYYAMDY

SEQ ID NO: 574 - protein, 446 aa, synthetic construct
  REGION 1..446: note = synthetic
EVQLVESGGGLVQPGGSLRLSCAASGFTFSSYIMSWVRQAPGKGLEWVSTISGGGTNTYYADSVKGRFTISRDNSKNTLYLQMNSLRAEDTAVYYCARWLLSYYAMDYWGQGTLVTVSSASTKGPSVFPLAPCSRSTSESTAALGCLVKDYFPEPVTVSWNSGALTSGVHTFPAVLQSSGLYSLSSVVTVPSSSLGTKTYTCNVDHKPSNTKVDKRVESKYGPPCPPCPAPEFLGGPSVFLFPPKPKDTLMISRTPEVTCVVVDVSQEDPEVQFNWYVDGVEVHNAKTKPREEQFNSTYRVVSVLTVLHQDWLNGKEYKCKVSNKGLPSSIEKTISKAKGQPREPQVYTLPPSQEEMTKNQVSLTCLVKGFYPSDIAVEWESNGQPENNYKTTPPVLDSDGSFFLYSRLTVDKSRWQEGNVFSCSVMHEALHNHYTQKSLSLSPGK

SEQ ID NO: 575 - protein, 107 aa, synthetic construct
  REGION 1..107: note = synthetic
DIQMTQSPSSLSASVGDRVTITCRASQNINVWLTWYQQKPGKAPKLLIYKASNLHTGVPSRFSGSGSGTDFTLTISSLQPEDFATYYCQQGQSYPYTFGQGTKLEIK

SEQ ID NO: 576 - protein, 11 aa, synthetic construct
  REGION 1..11: note = synthetic
RASQNINVWLT

SEQ ID NO: 577 - protein, 7 aa, synthetic construct
  REGION 1..7: note = synthetic
KASNLHT

SEQ ID NO: 578 - protein, 9 aa, synthetic construct
  REGION 1..9: note = synthetic
QQGQSYPYT

SEQ ID NO: 579 - protein, 214 aa, synthetic construct
  REGION 1..214: note = synthetic
DIQMTQSPSSLSASVGDRVTITCRASQNINVWLTWYQQKPGKAPKLLIYKASNLHTGVPSRFSGSGSGTDFTLTISSLQPEDFATYYCQQGQSYPYTFGQGTKLEIKRTVAAPSVFIFPPSDEQLKSGTASVVCLLNNFYPREAKVQWKVDNALQSGNSQESVTEQDSKDSTYSLSSTLTLSKADYEKHKVYACEVTHQGLSSPVTKSFNRGEC

SEQ ID NO: 580 - protein, 119 aa, synthetic construct
  REGION 1..119: note = synthetic
EVQLVESGGGLVQPGGSLRLSCAASGFTFSSYIMSWVRQAPGKGLEWVSTISGGGTNTYYADSVKGRFTISRDNSKNTLYLQMNSLRAEDTAVYYCAKWLLSYYAMDYWGQGTLVTVSS

SEQ ID NO: 581 - protein, 10 aa, synthetic construct
  REGION 1..10: note = synthetic
GFTFSSYIMS

SEQ ID NO: 582 - protein, 10 aa, synthetic construct
  REGION 1..10: note = synthetic
TISGGGTNTY

SEQ ID NO: 583 - protein, 10 aa, synthetic construct
  REGION 1..10: note = synthetic
WLLSYYAMDY

SEQ ID NO: 584 - protein, 446 aa, synthetic construct
  REGION 1..446: note = synthetic
EVQLVESGGGLVQPGGSLRLSCAASGFTFSSYIMSWVRQAPGKGLEWVSTISGGGTNTYYADSVKGRFTISRDNSKNTLYLQMNSLRAEDTAVYYCAKWLLSYYAMDYWGQGTLVTVSSASTKGPSVFPLAPCSRSTSESTAALGCLVKDYFPEPVTVSWNSGALTSGVHTFPAVLQSSGLYSLSSVVTVPSSSLGTKTYTCNVDHKPSNTKVDKRVESKYGPPCPPCPAPEFLGGPSVFLFPPKPKDTLMISRTPEVTCVVVDVSQEDPEVQFNWYVDGVEVHNAKTKPREEQFNSTYRVVSVLTVLHQDWLNGKEYKCKVSNKGLPSSIEKTISKAKGQPREPQVYTLPPSQEEMTKNQVSLTCLVKGFYPSDIAVEWESNGQPENNYKTTPPVLDSDGSFFLYSRLTVDKSRWQEGNVFSCSVMHEALHNHYTQKSLSLSPGK

SEQ ID NO: 585 - protein, 107 aa, synthetic construct; identical to SEQ ID NO: 575
  REGION 1..107: note = synthetic

SEQ ID NO: 586 - protein, 11 aa, synthetic construct
  REGION 1..11: note = synthetic
RASQNINVWLT

SEQ ID NO: 587 - protein, 7 aa, synthetic construct
  REGION 1..7: note = synthetic
KASNLHT

SEQ ID NO: 588 - protein, 9 aa, synthetic construct
  REGION 1..9: note = synthetic
QQGQSYPYT

SEQ ID NO: 589 - protein, 214 aa, synthetic construct; identical to SEQ ID NO: 579
  REGION 1..214: note = synthetic

SEQ ID NO: 590 - protein, 119 aa, synthetic construct
  REGION 1..119: note = synthetic
EVQLVESGGGLVQPGGSLRLSCAASGFTFSSYIMSWVRQAPGKGLEWVATISGGGTNTYYADSVKGRFTISRDNSKNTLYLQMNSLRAEDTAVYYCAKWLLSYYAMDYWGQGTLVTVSS

SEQ ID NO: 591 - protein, 10 aa, synthetic construct
  REGION 1..10: note = synthetic
GFTFSSYIMS

SEQ ID NO: 592 - protein, 10 aa, synthetic construct
  REGION 1..10: note = synthetic
TISGGGTNTY

SEQ ID NO: 593 - protein, 10 aa, synthetic construct
  REGION 1..10: note = synthetic
WLLSYYAMDY

SEQ ID NO: 594 - protein, 446 aa, synthetic construct
  REGION 1..446: note = synthetic
EVQLVESGGGLVQPGGSLRLSCAASGFTFSSYIMSWVRQAPGKGLEWVATISGGGTNTYYADSVKGRFTISRDNSKNTLYLQMNSLRAEDTAVYYCAKWLLSYYAMDYWGQGTLVTVSSASTKGPSVFPLAPCSRSTSESTAALGCLVKDYFPEPVTVSWNSGALTSGVHTFPAVLQSSGLYSLSSVVTVPSSSLGTKTYTCNVDHKPSNTKVDKRVESKYGPPCPPCPAPEFLGGPSVFLFPPKPKDTLMISRTPEVTCVVVDVSQEDPEVQFNWYVDGVEVHNAKTKPREEQFNSTYRVVSVLTVLHQDWLNGKEYKCKVSNKGLPSSIEKTISKAKGQPREPQVYTLPPSQEEMTKNQVSLTCLVKGFYPSDIAVEWESNGQPENNYKTTPPVLDSDGSFFLYSRLTVDKSRWQEGNVFSCSVMHEALHNHYTQKSLSLSPGK

SEQ ID NO: 595 - protein, 107 aa, synthetic construct; identical to SEQ ID NO: 575
  REGION 1..107: note = synthetic

SEQ ID NO: 596 - protein, 11 aa, synthetic construct
  REGION 1..11: note = synthetic
RASQNINVWLT

SEQ ID NO: 597 - protein, 7 aa, synthetic construct
  REGION 1..7: note = synthetic
KASNLHT

SEQ ID NO: 598 - protein, 9 aa, synthetic construct
  REGION 1..9: note = synthetic
QQGQSYPYT

SEQ ID NO: 599 - protein, 214 aa, synthetic construct; identical to SEQ ID NO: 579
  REGION 1..214: note = synthetic

SEQ ID NO: 600 - protein, 119 aa, synthetic construct; identical to SEQ ID NO: 580
  REGION 1..119: note = synthetic

SEQ ID NO: 601 - protein, 10 aa, synthetic construct
  REGION 1..10: note = synthetic
GFTFSSYIMS

SEQ ID NO: 602 - protein, 10 aa, synthetic construct
  REGION 1..10: note = synthetic
TISGGGTNTY

SEQ ID NO: 603 - protein, 10 aa, synthetic construct
  REGION 1..10: note = synthetic
WLLSYYAMDY

SEQ ID NO: 604 - protein, 446 aa, synthetic construct; identical to SEQ ID NO: 584
  REGION 1..446: note = synthetic

SEQ ID NO: 605 - protein, 107 aa, synthetic construct
  REGION 1..107: note = synthetic
DIQMTQSPSSLSASVGDRITITCRASQNINVWLTWYQQKPGKAPKLLIYKASNLHTGVPSRFSGSGSGTDFTLTISSLQPEDFATYYCQQGQSYPYTFGQGTKLEIK

SEQ ID NO: 606 - protein, 11 aa, synthetic construct
  REGION 1..11: note = sfynthetic
RASQNINVWLT

SEQ ID NO: 607 - protein, 7 aa, synthetic construct
  REGION 1..7: note = synthetic
KASNLHT

SEQ ID NO: 608 - protein, 9 aa, synthetic construct
  REGION 1..9: note = synthetic
QQGQSYPYT

SEQ ID NO: 609 - protein, 214 aa, synthetic construct
  REGION 1..214: note = synthetic
DIQMTQSPSSLSASVGDRITITCRASQNINVWLTWYQQKPGKAPKLLIYKASNLHTGVPSRFSGSGSGTDFTLTISSLQPEDFATYYCQQGQSYPYTFGQGTKLEIKRTVAAPSVFIFPPSDEQLKSGTASVVCLLNNFYPREAKVQWKVDNALQSGNSQESVTEQDSKDSTYSLSSTLTLSKADYEKHKVYACEVTHQGLSSPVTKSFNRGEC

SEQ ID NO: 610 - protein, 119 aa, synthetic construct; identical to SEQ ID NO: 590
  REGION 1..119: note = synthetic

SEQ ID NO: 611 - protein, 10 aa, synthetic construct
  REGION 1..10: note = synthetic
GFTFSSYIMS

SEQ ID NO: 612 - protein, 10 aa, synthetic construct
  REGION 1..10: note = synthetic
TISGGGTNTY

SEQ ID NO: 613 - protein, 10 aa, synthetic construct
  REGION 1..10: note = synthetic
WLLSYYAMDY

SEQ ID NO: 614 - protein, 446 aa, synthetic construct; identical to SEQ ID NO: 594
  REGION 1..446: note = synthetic

SEQ ID NO: 615 - protein, 107 aa, synthetic construct; identical to SEQ ID NO: 605
  REGION 1..107: note = synthetic

SEQ ID NO: 616 - protein, 11 aa, synthetic construct
  REGION 1..11: note = synthetic
RASQNINVWLT

SEQ ID NO: 617 - protein, 7 aa, synthetic construct
  REGION 1..7: note = synthetic
KASNLHT

SEQ ID NO: 618 - protein, 9 aa, synthetic construct
  REGION 1..9: note = synthetic
QQGQSYPYT

SEQ ID NO: 619 - protein, 214 aa, synthetic construct; identical to SEQ ID NO: 609
  REGION 1..214: note = synthetic

SEQ ID NO: 620 - protein, 119 aa, synthetic construct; identical to SEQ ID NO: 580
  REGION 1..119: note = synthetic

SEQ ID NO: 621 - protein, 10 aa, synthetic construct
  REGION 1..10: note = synthetic
GFTFSSYIMS

SEQ ID NO: 622 - protein, 10 aa, synthetic construct
  REGION 1..10: note = synthetic
TISGGGTNTY

SEQ ID NO: 623 - protein, 10 aa, synthetic construct
  REGION 1..10: note = synthetic
WLLSYYAMDY

SEQ ID NO: 624 - protein, 446 aa, synthetic construct; identical to SEQ ID NO: 584
  REGION 1..446: note = synthetic

SEQ ID NO: 625 - protein, 446 aa, synthetic construct; identical to SEQ ID NO: 584
  REGION 1..446: note = synthetic

SEQ ID NO: 626 - protein, 11 aa, synthetic construct
  REGION 1..11: note = synthetic
RASQNINVWLT

SEQ ID NO: 627 - protein, 7 aa, synthetic construct
  REGION 1..7: note = synthetic
KASKSHT

SEQ ID NO: 628 - protein, 9 aa, synthetic construct
  REGION 1..9: note = synthetic
QQGQSYPYT

SEQ ID NO: 629 - protein, 214 aa, synthetic construct
  REGION 1..214: note = synthetic
DIQMTQSPSSLSASVGDRVTITCRASQNINVWLTWYQQKPGKAPKLLIYKASKSHTGVPSRFSGSGSGTDFTLTISSLQPEDFATYYCQQGQSYPYTFGQGTKLEIKRTVAAPSVFIFPPSDEQLKSGTASVVCLLNNFYPREAKVQWKVDNALQSGNSQESVTEQDSKDSTYSLSSTLTLSKADYEKHKVYACEVTHQGLSSPVTKSFNRGEC

SEQ ID NO: 630 - protein, 119 aa, synthetic construct; identical to SEQ ID NO: 590
  REGION 1..119: note = synthetic

SEQ ID NO: 631 - protein, 10 aa, synthetic construct
  REGION 1..10: note = synthetic
GFTFSSYIMS

SEQ ID NO: 632 - protein, 10 aa, synthetic construct
  REGION 1..10: note = synthetic
TISGGGTNTY

SEQ ID NO: 633 - protein, 10 aa, synthetic construct
  REGION 1..10: note = sunthetic
WLLSYYAMDY

SEQ ID NO: 634 - protein, 446 aa, synthetic construct; identical to SEQ ID NO: 594
  REGION 1..446: note = synthetic

SEQ ID NO: 635 - protein, 107 aa, synthetic construct
  REGION 1..107: note = synthetic
DIQMTQSPSSLSASVGDRVTITCRASQNINVWLTWYQQKPGKAPKLLIYKASKSHTGVPSRFSGSGSGTDFTLTISSLQPEDFATYYCQQGQSYPYTFGQGTKLEIK

SEQ ID NO: 636 - protein, 11 aa, synthetic construct
  REGION 1..11: note = sfynthetic
RASQNINVWLT

SEQ ID NO: 637 - protein, 7 aa, synthetic construct
  REGION 1..7: note = synthetic
KASKSHT

SEQ ID NO: 638 - protein, 9 aa, synthetic construct
  REGION 1..9: note = synthetic
QQGQSYPYT

SEQ ID NO: 639 - protein, 214 aa, synthetic construct; identical to SEQ ID NO: 629
  REGION 1..214: note = synthetic

SEQ ID NO: 640 - protein, 119 aa, synthetic construct; identical to SEQ ID NO: 580
  REGION 1..119: note = synthetic

SEQ ID NO: 641 - protein, 10 aa, synthetic construct
  REGION 1..10: note = synthetic
GFTFSSYIMS

SEQ ID NO: 642 - protein, 10 aa, synthetic construct
  REGION 1..10: note = synthetic
TISGGGTNTY

SEQ ID NO: 643 - protein, 10 aa, synthetic construct
  REGION 1..10: note = synthetic
WLLSYYAMDY

SEQ ID NO: 644 - protein, 446 aa, synthetic construct; identical to SEQ ID NO: 584
  REGION 1..446: note = synthetic

SEQ ID NO: 645 - protein, 107 aa, synthetic construct
  REGION 1..107: note = synthetic
DIQMTQSPSSLSASVGDRITITCRASQNINVWLTWYQQKPGKAPKLLIYKASKSHTGVPSRFSGSGSGTDFTLTISSLQPEDFATYYCQQGQSYPYTFGQGTKLEIK

SEQ ID NO: 646 - protein, 11 aa, synthetic construct
  REGION 1..11: note = synthetic
RASQNINVWLT

SEQ ID NO: 647 - protein, 7 aa, synthetic construct
  REGION 1..7: note = synthetic
KASKSHT

SEQ ID NO: 648 - protein, 9 aa, synthetic construct
  REGION 1..9: note = synthetic
QQGQSYPYT

SEQ ID NO: 649 - protein, 214 aa, synthetic construct
  REGION 1..214: note = synthetic
DIQMTQSPSSLSASVGDRITITCRASQNINVWLTWYQQKPGKAPKLLIYKASKSHTGVPSRFSGSGSGTDFTLTISSLQPEDFATYYCQQGQSYPYTFGQGTKLEIKRTVAAPSVFIFPPSDEQLKSGTASVVCLLNNFYPREAKVQWKVDNALQSGNSQESVTEQDSKDSTYSLSSTLTLSKADYEKHKVYACEVTHQGLSSPVTKSFNRGEC

SEQ ID NO: 650 - protein, 119 aa, synthetic construct; identical to SEQ ID NO: 590
  REGION 1..119: note = synthetic

SEQ ID NO: 651 - protein, 10 aa, synthetic construct
  REGION 1..10: note = synthetcpic
GFTFSSYIMS

SEQ ID NO: 652 - protein, 10 aa, synthetic construct
  REGION 1..10: note = synthetic
TISGGGTNTY

SEQ ID NO: 653 - protein, 10 aa, synthetic construct
  REGION 1..10: note = synthetic
WLLSYYAMDY

SEQ ID NO: 654 - protein, 446 aa, synthetic construct; identical to SEQ ID NO: 594
  REGION 1..446: note = synthetic

SEQ ID NO: 655 - protein, 107 aa, synthetic construct; identical to SEQ ID NO: 645
  REGION 1..107: note = synthetic

SEQ ID NO: 656 - protein, 11 aa, synthetic construct
  REGION 1..11: note = synthetic
RASQNINVWLT

SEQ ID NO: 657 - protein, 7 aa, synthetic construct
  REGION 1..7: note = sfynthetic
KASKSHT

SEQ ID NO: 658 - protein, 9 aa, synthetic construct
  REGION 1..9: note = synthetic
QQGQSYPYT

SEQ ID NO: 659 - protein, 214 aa, synthetic construct; identical to SEQ ID NO: 649
  REGION 1..214: note = synthetic

SEQ ID NO: 660 - protein, 119 aa, synthetic construct
  REGION 1..119: note = synthetic
QVQLVQSGAEVKKPGASVKVSCKASGYTITNYGMNWVRQAPGQGLEWMGWINTYTGEPTYAQKFQGRVTMTRDTSTSTVYMELSSLRSEDTAVYYCARGNGNPLGMDYWGQGTLVTVSS

SEQ ID NO: 661 - protein, 10 aa, synthetic construct
  REGION 1..10: note = synthetic
GYTITNYGMN

SEQ ID NO: 662 - protein, 10 aa, synthetic construct
  REGION 1..10: note = synthetic
WINTYTGEPT

SEQ ID NO: 663 - protein, 10 aa, synthetic construct
  REGION 1..10: note = synthetic
GNGNPLGMDY

SEQ ID NO: 664 - protein, 446 aa, synthetic construct
  REGION 1..446: note = synthetic
QVQLVQSGAEVKKPGASVKVSCKASGYTITNYGMNWVRQAPGQGLEWMGWINTYTGEPTYAQKFQGRVTMTRDTSTSTVYMELSSLRSEDTAVYYCARGNGNPLGMDYWGQGTLVTVSSASTKGPSVFPLAPCSRSTSESTAALGCLVKDYFPEPVTVSWNSGALTSGVHTFPAVLQSSGLYSLSSVVTVPSSSLGTKTYTCNVDHKPSNTKVDKRVESKYGPPCPPCPAPEFLGGPSVFLFPPKPKDTLMISRTPEVTCVVVDVSQEDPEVQFNWYVDGVEVHNAKTKPREEQFNSTYRVVSVLTVLHQDWLNGKEYKCKVSNKGLPSSIEKTISKAKGQPREPQVYTLPPSQEEMTKNQVSLTCLVKGFYPSDIAVEWESNGQPENNYKTTPPVLDSDGSFFLYSRLTVDKSRWQEGNVFSCSVMHEALHNHYTQKSLSLSPGK

SEQ ID NO: 665 - protein, 106 aa, synthetic construct
  REGION 1..106: note = synthetic
EIVLTQSPATLSLSPGERATLSCGNGNPLGMDYWYQQKPGQAPRLLIYDTSKLASGIPARFSGSGSGTDFTLTISSLEPEDFAVYYCFQGSGYPLTFGQGTKLEIK

SEQ ID NO: 666 - protein, 10 aa, synthetic construct
  REGION 1..10: note = synthetic
GNGNPLGMDY

SEQ ID NO: 667 - protein, 7 aa, synthetic construct
  REGION 1..7: note = synthetic
DTSKLAS

SEQ ID NO: 668 - protein, 9 aa, synthetic construct
  REGION 1..9: note = synthetic
FQGSGYPLT

SEQ ID NO: 669 - protein, 213 aa, synthetic construct
  REGION 1..213: note = synthetic
EIVLTQSPATLSLSPGERATLSCGNGNPLGMDYWYQQKPGQAPRLLIYDTSKLASGIPARFSGSGSGTDFTLTISSLEPEDFAVYYCFQGSGYPLTFGQGTKLEIKRTVAAPSVFIFPPSDEQLKSGTASVVCLLNNFYPREAKVQWKVDNALQSGNSQESVTEQDSKDSTYSLSSTLTLSKADYEKHKVYACEVTHQGLSSPVTKSFNRGEC

SEQ ID NO: 670 - protein, 119 aa, synthetic construct
  REGION 1..119: note = synthetic
QVQLVQSGAEVKKPGASVKVSCKASGYTITNYGMNWVRQAPGQGLEWMGWINTYTGEPTYAQKFQGRFTMTLDTSTSTVYMELSSLRSEDTAVYYCARGNGNPLGMDYWGQGTLVTVSS

SEQ ID NO: 671 - protein, 10 aa, synthetic construct
  REGION 1..10: note = synthetic
GYTITNYGMN

SEQ ID NO: 672 - protein, 10 aa, synthetic construct
  REGION 1..10: note = synthetic
WINTYTGEPT

SEQ ID NO: 673 - protein, 10 aa, synthetic construct
  REGION 1..10: note = synthetic
GNGNPLGMDY

SEQ ID NO: 674 - protein, 446 aa, synthetic construct
  REGION 1..446: note = synthetic
QVQLVQSGAEVKKPGASVKVSCKASGYTITNYGMNWVRQAPGQGLEWMGWINTYTGEPTYAQKFQGRFTMTLDTSTSTVYMELSSLRSEDTAVYYCARGNGNPLGMDYWGQGTLVTVSSASTKGPSVFPLAPCSRSTSESTAALGCLVKDYFPEPVTVSWNSGALTSGVHTFPAVLQSSGLYSLSSVVTVPSSSLGTKTYTCNVDHKPSNTKVDKRVESKYGPPCPPCPAPEFLGGPSVFLFPPKPKDTLMISRTPEVTCVVVDVSQEDPEVQFNWYVDGVEVHNAKTKPREEQFNSTYRVVSVLTVLHQDWLNGKEYKCKVSNKGLPSSIEKTISKAKGQPREPQVYTLPPSQEEMTKNQVSLTCLVKGFYPSDIAVEWESNGQPENNYKTTPPVLDSDGSFFLYSRLTVDKSRWQEGNVFSCSVMHEALHNHYTQKSLSLSPGK

SEQ ID NO: 675 - protein, 106 aa, synthetic construct
  REGION 1..106: note = synthetic
EIVLTQSPATLSLSPGERATLSCGNGNPLGMDYWYQQKPGQAPRLLIYDTSKLASGIPARFSGSGSGTDYTLTISSLEPEDFAVYYCFQGSGYPLTFGQGTKLEIK

SEQ ID NO: 676 - protein, 10 aa, synthetic construct
  REGION 1..10: note = synthetic
GNGNPLGMDY

SEQ ID NO: 677 - protein, 7 aa, synthetic construct
  REGION 1..7: note = synthetic
DTSKLAS

SEQ ID NO: 678 - protein, 9 aa, synthetic construct
  REGION 1..9: note = synthetic
FQGSGYPLT

SEQ ID NO: 679 - protein, 213 aa, synthetic construct
  REGION 1..213: note = synthetic
EIVLTQSPATLSLSPGERATLSCGNGNPLGMDYWYQQKPGQAPRLLIYDTSKLASGIPARFSGSGSGTDYTLTISSLEPEDFAVYYCFQGSGYPLTFGQGTKLEIKRTVAAPSVFIFPPSDEQLKSGTASVVCLLNNFYPREAKVQWKVDNALQSGNSQESVTEQDSKDSTYSLSSTLTLSKADYEKHKVYACEVTHQGLSSPVTKSFNRGEC

SEQ ID NO: 680 - protein, 119 aa, synthetic construct; identical to SEQ ID NO: 670
  REGION 1..119: note = synthetic

SEQ ID NO: 681 - protein, 10 aa, synthetic construct
  REGION 1..10: note = synthetic
GYTITNYGMN

SEQ ID NO: 682 - protein, 10 aa, synthetic construct
  REGION 1..10: note = synthetic
WINTYTGEPT

SEQ ID NO: 683 - protein, 10 aa, synthetic construct
  REGION 1..10: note = synthetic
GNGNPLGMDY

SEQ ID NO: 684 - protein, 446 aa, synthetic construct; identical to SEQ ID NO: 674
  REGION 1..446: note = synthetic

SEQ ID NO: 685 - protein, 106 aa, synthetic construct
  REGION 1..106: note = synthetic
EIVLTQSPATLSLSPGERATLSCGNGNPLGMDYWYQQKPGQAPRLWIYDTSKLASGVPARFSGSGSGTDYTLTISSLEPEDFAVYYCFQGSGYPLTFGQGTKLEIK

SEQ ID NO: 686 - protein, 10 aa, synthetic construct
  REGION 1..10: note = synthetic
GNGNPLGMDY

SEQ ID NO: 687 - protein, 7 aa, synthetic construct
  REGION 1..7: note = synthetic
DTSKLAS

SEQ ID NO: 688 - protein, 9 aa, synthetic construct
  REGION 1..9: note = synthetic
FQGSGYPLT

SEQ ID NO: 689 - protein, 213 aa, synthetic construct
  REGION 1..213: note = synthetic
EIVLTQSPATLSLSPGERATLSCGNGNPLGMDYWYQQKPGQAPRLWIYDTSKLASGVPARFSGSGSGTDYTLTISSLEPEDFAVYYCFQGSGYPLTFGQGTKLEIKRTVAAPSVFIFPPSDEQLKSGTASVVCLLNNFYPREAKVQWKVDNALQSGNSQESVTEQDSKDSTYSLSSTLTLSKADYEKHKVYACEVTHQGLSSPVTKSFNRGEC

SEQ ID NO: 690 - protein, 119 aa, synthetic construct; identical to SEQ ID NO: 670
  REGION 1..119: note = synthetic

SEQ ID NO: 691 - protein, 10 aa, synthetic construct
  REGION 1..10: note = synthetic
GYTITNYGMN

SEQ ID NO: 692 - protein, 10 aa, synthetic construct
  REGION 1..10: note = synthetic
WINTYTGEPT

SEQ ID NO: 693 - protein, 10 aa, synthetic construct
  REGION 1..10: note = synthetic
GNGNPLGMDY

SEQ ID NO: 694 - protein, 446 aa, synthetic construct; identical to SEQ ID NO: 674
  REGION 1..446: note = synthetic

SEQ ID NO: 695 - protein, 106 aa, synthetic construct
  REGION 1..106: note = synthetic
EIVLTQSPATLSLSPGERVTMSCGNGNPLGMDYWYQQKPGQAPRLWIYDTSKLASGVPARFSGSGSGTDYTLTISSMEPEDFAVYYCFQGSGYPLTFGQGTKLEIK

SEQ ID NO: 696 - protein, 10 aa, synthetic construct
  REGION 1..10: note = synthetic
GNGNPLGMDY

SEQ ID NO: 697 - protein, 7 aa, synthetic construct
  REGION 1..7: note = synthetic
DTSKLAS

SEQ ID NO: 698 - protein, 9 aa, synthetic construct
  REGION 1..9: note = synthetic
FQGSGYPLT

SEQ ID NO: 699 - protein, 213 aa, synthetic construct
  REGION 1..213: note = synthetic
EIVLTQSPATLSLSPGERVTMSCGNGNPLGMDYWYQQKPGQAPRLWIYDTSKLASGVPARFSGSGSGTDYTLTISSMEPEDFAVYYCFQGSGYPLTFGQGTKLEIKRTVAAPSVFIFPPSDEQLKSGTASVVCLLNNFYPREAKVQWKVDNALQSGNSQESVTEQDSKDSTYSLSSTLTLSKADYEKHKVYACEVTHQGLSSPVTKSFNRGEC

SEQ ID NO: 700 - protein, 119 aa, synthetic construct
  REGION 1..119: note = synthetic
QVQLVQSGAEVKKPGASVKISCKASGYTITNYGMNWVRQAPGQGLEWMGWINTYTGEPTYAQKFQGRFTITLDTSTSTVYLEISSLRSEDTAVYYCARGNGNPLGMDYWGQGTLVTVSS

SEQ ID NO: 701 - protein, 10 aa, synthetic construct
  REGION 1..10: note = synthetic
GYTITNYGMN

SEQ ID NO: 702 - protein, 10 aa, synthetic construct
  REGION 1..10: note = synthetic
WINTYTGEPT

SEQ ID NO: 703 - protein, 10 aa, synthetic construct
  REGION 1..10: note = synthetic
GNGNPLGMDY

SEQ ID NO: 704 - protein, 446 aa, synthetic construct
  REGION 1..446: note = synthetic
QVQLVQSGAEVKKPGASVKISCKASGYTITNYGMNWVRQAPGQGLEWMGWINTYTGEPTYAQKFQGRFTITLDTSTSTVYLEISSLRSEDTAVYYCARGNGNPLGMDYWGQGTLVTVSSASTKGPSVFPLAPCSRSTSESTAALGCLVKDYFPEPVTVSWNSGALTSGVHTFPAVLQSSGLYSLSSVVTVPSSSLGTKTYTCNVDHKPSNTKVDKRVESKYGPPCPPCPAPEFLGGPSVFLFPPKPKDTLMISRTPEVTCVVVDVSQEDPEVQFNWYVDGVEVHNAKTKPREEQFNSTYRVVSVLTVLHQDWLNGKEYKCKVSNKGLPSSIEKTISKAKGQPREPQVYTLPPSQEEMTKNQVSLTCLVKGFYPSDIAVEWESNGQPENNYKTTPPVLDSDGSFFLYSRLTVDKSRWQEGNVFSCSVMHEALHNHYTQKSLSLSPGK

SEQ ID NO: 705 - protein, 106 aa, synthetic construct; identical to SEQ ID NO: 675
  REGION 1..106: note = synthetic

SEQ ID NO: 706 - protein, 10 aa, synthetic construct
  REGION 1..10: note = synthetic
GNGNPLGMDY

SEQ ID NO: 707 - protein, 7 aa, synthetic construct
  REGION 1..7: note = synthetic
DTSKLAS

SEQ ID NO: 708 - protein, 9 aa, synthetic construct
  REGION 1..9: note = synthetic
FQGSGYPLT

SEQ ID NO: 709 - protein, 213 aa, synthetic construct; identical to SEQ ID NO: 679
  REGION 1..213: note = synthetic

SEQ ID NO: 710 - protein, 119 aa, synthetic construct; identical to SEQ ID NO: 700
  REGION 1..119: note = synthetic

SEQ ID NO: 711 - protein, 10 aa, synthetic construct
  REGION 1..10: note = synthetic
GYTITNYGMN

SEQ ID NO: 712 - protein, 10 aa, synthetic construct
  REGION 1..10: note = synthetic
WINTYTGEPT

SEQ ID NO: 713 - protein, 10 aa, synthetic construct
  REGION 1..10: note = synthetic
GNGNPLGMDY

SEQ ID NO: 714 - protein, 446 aa, synthetic construct; identical to SEQ ID NO: 704
  REGION 1..446: note = synthetic

SEQ ID NO: 715 - protein, 106 aa, synthetic construct; identical to SEQ ID NO: 685
  REGION 1..106: note = synthetic

SEQ ID NO: 716 - protein, 10 aa, synthetic construct
  REGION 1..10: note = synthetic
GNGNPLGMDY

SEQ ID NO: 717 - protein, 7 aa, synthetic construct
  REGION 1..7: note = synthetic
DTSKLAS

SEQ ID NO: 718 - protein, 9 aa, synthetic construct
  REGION 1..9: note = synthetic
FQGSGYPLT

SEQ ID NO: 719 - protein, 213 aa, synthetic construct; identical to SEQ ID NO: 689
  REGION 1..213: note = synthetic

SEQ ID NO: 720 - protein, 119 aa, synthetic construct; identical to SEQ ID NO: 700
  REGION 1..119: note = synthetic

SEQ ID NO: 721 - protein, 10 aa, synthetic construct
  REGION 1..10: note = synthetic
GYTITNYGMN

SEQ ID NO: 722 - protein, 10 aa, synthetic construct
  REGION 1..10: note = synthetic
WINTYTGEPT

SEQ ID NO: 723 - protein, 10 aa, synthetic construct
  REGION 1..10: note = synthetic
GNGNPLGMDY

SEQ ID NO: 724 - protein, 446 aa, synthetic construct; identical to SEQ ID NO: 704
  REGION 1..446: note = synthetic

SEQ ID NO: 725 - protein, 106 aa, synthetic construct; identical to SEQ ID NO: 695
  REGION 1..106: note = synthetic

SEQ ID NO: 726 - protein, 10 aa, synthetic construct
  REGION 1..10: note = synthetic
GNGNPLGMDY

SEQ ID NO: 727 - protein, 7 aa, synthetic construct
  REGION 1..7: note = synthetic
DTSKLAS

SEQ ID NO: 728 - protein, 9 aa, synthetic construct
  REGION 1..9: note = synthetic
FQGSGYPLT

SEQ ID NO: 729 - protein, 213 aa, synthetic construct; identical to SEQ ID NO: 699
  REGION 1..213: note = synthetic

SEQ ID NO: 730 - protein, 119 aa, synthetic construct; identical to SEQ ID NO: 580
  REGION 1..119: note = synthetic

SEQ ID NO: 731 - protein, 10 aa, synthetic construct
  REGION 1..10: note = synthetic
GFTFSSYIMS

SEQ ID NO: 732 - protein, 10 aa, synthetic construct
  REGION 1..10: note = synthetic
TISGGGTNTY

SEQ ID NO: 733 - protein, 10 aa, synthetic construct
  REGION 1..10: note = synthetic
WLLSYYAMDY

SEQ ID NO: 734 - protein, 446 aa, synthetic construct; identical to SEQ ID NO: 584
  REGION 1..446: note = synthetic

SEQ ID NO: 735 - protein, 107 aa, synthetic construct
  REGION 1..107: note = synthetic
DIQMTQSPSSLSASVGDRVTITCRASQNINVWLSWYQQKPGKAPKLLIYKASKSHTGVPSRFSGSGSGTDFTLTISSLQPEDFATYYCQQGQSYPYTFGQGTKLEIK

SEQ ID NO: 736 - protein, 11 aa, synthetic construct
  REGION 1..11: note = synthetic
RASQNINVWLS

SEQ ID NO: 737 - protein, 7 aa, synthetic construct
  REGION 1..7: note = synthetic
KASKSHT

SEQ ID NO: 738 - protein, 9 aa, synthetic construct
  REGION 1..9: note = synthetic
QQGQSYPYT

SEQ ID NO: 739 - protein, 214 aa, synthetic construct
  REGION 1..214: note = synthetic
DIQMTQSPSSLSASVGDRVTITCRASQNINVWLSWYQQKPGKAPKLLIYKASKSHTGVPSRFSGSGSGTDFTLTISSLQPEDFATYYCQQGQSYPYTFGQGTKLEIKRTVAAPSVFIFPPSDEQLKSGTASVVCLLNNFYPREAKVQWKVDNALQSGNSQESVTEQDSKDSTYSLSSTLTLSKADYEKHKVYACEVTHQGLSSPVTKSFNRGEC

SEQ ID NO: 740 - protein, 119 aa, synthetic construct; identical to SEQ ID NO: 580
  REGION 1..119: note = synthetic

SEQ ID NO: 741 - protein, 10 aa, synthetic construct
  REGION 1..10: note = synthetic
GFTFSSYIMS

SEQ ID NO: 742 - protein, 10 aa, synthetic construct
  REGION 1..10: note = synthetic
TISGGGTNTY

SEQ ID NO: 743 - protein, 10 aa, synthetic construct
  REGION 1..10: note = synthetic
WLLSYYAMDY

SEQ ID NO: 744 - protein, 446 aa, synthetic construct; identical to SEQ ID NO: 584
  REGION 1..446: note = synthetic

SEQ ID NO: 745 - protein, 107 aa, synthetic construct
  REGION 1..107: note = synthetic
DIQMTQSPSSLSASVGDRITITCRASQNINVWLSWYQQKPGKAPKLLIYKASKSHTGVPSRFSGSGSGTDFTLTISSLQPEDFATYYCQQGQSYPYTFGQGTKLEIK

SEQ ID NO: 746 - protein, 11 aa, synthetic construct
  REGION 1..11: note = synthetic
RASQNINVWLS

SEQ ID NO: 747 - protein, 7 aa, synthetic construct
  REGION 1..7: note = synthetic
KASKSHT

SEQ ID NO: 748 - protein, 9 aa, synthetic construct
  REGION 1..9: note = synthetic
QQGQSYPYT

SEQ ID NO: 749 - protein, 214 aa, synthetic construct
  REGION 1..214: note = synthetic
DIQMTQSPSSLSASVGDRITITCRASQNINVWLSWYQQKPGKAPKLLIYKASKSHTGVPSRFSGSGSGTDFTLTISSLQPEDFATYYCQQGQSYPYTFGQGTKLEIKRTVAAPSVFIFPPSDEQLKSGTASVVCLLNNFYPREAKVQWKVDNALQSGNSQESVTEQDSKDSTYSLSSTLTLSKADYEKHKVYACEVTHQGLSSPVTKSFNRGEC

SEQ ID NO: 750 - protein, 119 aa, synthetic construct; identical to SEQ ID NO: 590
  REGION 1..119: note = synthetic

SEQ ID NO: 751 - protein, 10 aa, synthetic construct
  REGION 1..10: note = synthetic
GFTFSSYIMS

SEQ ID NO: 752 - protein, 10 aa, synthetic construct
  REGION 1..10: note = synthetic
TISGGGTNTY

SEQ ID NO: 753 - protein, 10 aa, synthetic construct
  REGION 1..10: note = synthetic
WLLSYYAMDY

SEQ ID NO: 754 - protein, 446 aa, synthetic construct; identical to SEQ ID NO: 594
  REGION 1..446: note = synthetic

SEQ ID NO: 755 - protein, 107 aa, synthetic construct; identical to SEQ ID NO: 735
  REGION 1..107: note = synthetic

SEQ ID NO: 756 - protein, 11 aa, synthetic construct
  REGION 1..11: note = synthetic
RASQNINVWLS

SEQ ID NO: 757 - protein, 7 aa, synthetic construct
  REGION 1..7: note = synthetic
KASKSHT

SEQ ID NO: 758 - protein, 9 aa, synthetic construct
  REGION 1..9: note = synthetic
QQGQSYPYT

SEQ ID NO: 759 - protein, 214 aa, synthetic construct; identical to SEQ ID NO: 739
  REGION 1..214: note = synthetic

SEQ ID NO: 760 - protein, 119 aa, synthetic construct; identical to SEQ ID NO: 590
  REGION 1..119: note = synthetic

SEQ ID NO: 761 - protein, 10 aa, synthetic construct
  REGION 1..10: note = sythetic
GFTFSSYIMS

SEQ ID NO: 762 - protein, 10 aa, synthetic construct
  REGION 1..10: note = synthetic
TISGGGTNTY

SEQ ID NO: 763 - protein, 10 aa, synthetic construct
  REGION 1..10: note = synthetic
WLLSYYAMDY

SEQ ID NO: 764 - protein, 446 aa, synthetic construct; identical to SEQ ID NO: 594
  REGION 1..446: note = synthetic

SEQ ID NO: 765 - protein, 107 aa, synthetic construct; identical to SEQ ID NO: 745
  REGION 1..107: note = synthetic

SEQ ID NO: 766 - protein, 11 aa, synthetic construct
  REGION 1..11: note = synthetic
RASQNINVWLS

SEQ ID NO: 767 - protein, 7 aa, synthetic construct
  REGION 1..7: note = synthetic
KASKSHT

SEQ ID NO: 768 - protein, 9 aa, synthetic construct
  REGION 1..9: note = synthetic
QQGQSYPYT

SEQ ID NO: 769 - protein, 214 aa, synthetic construct; identical to SEQ ID NO: 749
  REGION 1..214: note = synthetic

SEQ ID NO: 770 - protein, 117 aa, synthetic construct
  REGION 1..117: note = synthetic
EVQLQQSGPELVKPGASMKISCKASGYSFTGYTMNWVRQSHGKNLEWLGLIFPYNGGTSYNQNFKGKATLTVDTSSSTAYMELLSLTSVDSAVYYCARGVRFALDYWGQGTSVSVSS

SEQ ID NO: 771 - protein, 10 aa, synthetic construct
  REGION 1..10: note = synthetic
GYSFTGYTMN

SEQ ID NO: 772 - protein, 10 aa, synthetic construct
  REGION 1..10: note = synthetic
LIFPYNGGTS

SEQ ID NO: 773 - protein, 8 aa, synthetic construct
  REGION 1..8: note = synthetic
GVRFALDY

SEQ ID NO: 774 - skipped

SEQ ID NO: 775 - protein, 112 aa, synthetic construct
  REGION 1..112: note = synthetic
DVVMTQTPLSLPVSFGDQVSISCRSSQSLANSYGNTYLSWYLHKPGQSPQLLIYEISNRFSGVPDRFSGSGSGTDFTLNISTIKPEDLGMYYCLQGTHQPWTFGGGTKLEIK

SEQ ID NO: 776 - protein, 16 aa, synthetic construct
  REGION 1..16: note = synthetic
RSSQSLANSYGNTYLS

SEQ ID NO: 777 - protein, 7 aa, synthetic construct
  REGION 1..7: note = synthetic
EISNRFS

SEQ ID NO: 778 - protein, 9 aa, synthetic construct
  REGION 1..9: note = synthetic
LQGTHQPWT

SEQ ID NO: 779 - skipped

SEQ ID NO: 780 - protein, 119 aa, synthetic construct; identical to SEQ ID NO: 410
  REGION 1..119: note = synthetic

SEQ ID NO: 781 - protein, 8 aa, synthetic construct
  REGION 1..8: note = synthetic
GYTFSSYV

SEQ ID NO: 782 - protein, 8 aa, synthetic construct
  REGION 1..8: note = synthetic
IDPYNDGA

SEQ ID NO: 783 - protein, 12 aa, synthetic construct
  REGION 1..12: note = synthetic
ARGGPYGWYFDV

SEQ ID NO: 784 - protein, 443 aa, synthetic construct
  REGION 1..443: note = synthetic
EVQLQQSGPELVKPGSSVKMSCKASGYTFSSYVMHWVKQKPGQGLEWIGYIDPYNDGAKYNEKFKGKATLTSDKSSSTAYMELSSLTSEDSAVYYCARGGPYGWYFDVWGAGTTVTVSSAKTTPPSVYPLAPGSAAQTNSMVTLGCLVKGYFPEPVTVTWNSGSLSSGVHTFPAVLQSDLYTLSSSVTVPSSTWPSETVTCNVAHPASSTKVDKKIVPRDCGCKPCICTVPEVSSVFIFPPKPKDVLTITLTPKVTCVVVDISKDDPEVQFSWFVDDVEVHTAQTQPREEQFNSTFRSVSELPIMHQDWLNGKEFKCRVNSAAFPAPIEKTISKTKGRPKAPQVYTIPPPKEQMAKDKVSLTCMITDFFPEDITVEWQWNGQPAENYKNTQPIMDTDGSYFVYSKLNVQKSNWEAGNTFTCSVLHEGLHNHHTEKSLSHSPGK

SEQ ID NO: 785 - protein, 107 aa, synthetic construct; identical to SEQ ID NO: 415
  REGION 1..107: note = synthetic

SEQ ID NO: 786 - protein, 6 aa, synthetic construct
  REGION 1..6: note = synthetic
EHIYSY

SEQ ID NO: 787 - skipped

SEQ ID NO: 788 - protein, 9 aa, synthetic construct
  REGION 1..9: note = synthetic
QHHFGSPLT

SEQ ID NO: 789 - protein, 214 aa, synthetic construct
  REGION 1..214: note = synthetic
DIQMTQSPASLSASVGETVTITCRASEHIYSYLSWYQQKQGKSPQLLVYNAKTLAEGVPSRFSGSGSGTQFSLKINSLQPEDFGTYYCQHHFGSPLTFGAGTTLELKRADAAPTVSIFPPSSEQLTSGGASVVCFLNNFYPKDINVKWKIDGSERQNGVLNSWTDQDSKDSTYSMSSTLTLTKDEYERHNSYTCEATHKTSTSPIVKSFNRNEC

SEQ ID NO: 790 - protein, 130 aa, synthetic construct; identical to SEQ ID NO: 420
  REGION 1..130: note = synthetic

SEQ ID NO: 791 - protein, 10 aa, synthetic construct
  REGION 1..10: note = synthetic
GGSVSSGIYY

SEQ ID NO: 792 - protein, 7 aa, synthetic construct
  REGION 1..7: note = synthetic
IYYSGST

SEQ ID NO: 793 - protein, 22 aa, synthetic construct
  REGION 1..22: note = synthetic
ARDYYVSGNYYNVDYYFFGVDV

SEQ ID NO: 794 - protein, 454 aa, synthetic construct
  REGION 1..454: note = synthetic
QVHLQESGPGLVKPSETLSLTCTVSGGSVSSGIYYWSWIRQPPGKGLEWIGYIYYSGSTNYNPSLKSRVTISVDTSKNQFSLKLSSVTAADTAVYYCARDYYVSGNYYNVDYYFFGVDVWGQGTTVTVSSAKTTPPSVYPLAPGSAAQTNSMVTLGCLVKGYFPEPVTVTWNSGSLSSGVHTFPAVLQSDLYTLSSSVTVPSSTWPSETVTCNVAHPASSTKVDKKIVPRDCGCKPCICTVPEVSSVFIFPPKPKDVLTITLTPKVTCVVVDISKDDPEVQFSWFVDDVEVHTAQTQPREEQFNSTFRSVSELPIMHQDWLNGKEFKCRVNSAAFPAPIEKTISKTKGRPKAPQVYTIPPPKEQMAKDKVSLTCMITDFFPEDITVEWQWNGQPAENYKNTQPIMDTDGSYFVYSKLNVQKSNWEAGNTFTCSVLHEGLHNHHTEKSLSHSPGK

SEQ ID NO: 795 - protein, 109 aa, synthetic construct; identical to SEQ ID NO: 425
  REGION 1..109: note = synthetic

SEQ ID NO: 796 - protein, 6 aa, synthetic construct
  REGION 1..6: note = synthetic
QSVSSY

SEQ ID NO: 797 - skipped

SEQ ID NO: 798 - protein, 11 aa, synthetic construct
  REGION 1..11: note = synthetic
QQRSNWPPLFT

SEQ ID NO: 799 - protein, 216 aa, synthetic construct
  REGION 1..216: note = synthetic
EIVLTQSPATLSLSPGERATLSCRASQSVSSYLAWYQQKPGQAPRLLIYDASNRATGIPARFSGSGSGTDFTLTISSLEPEDFAVYYCQQRSNWPPLFTFGPGTKVDIKRADAAPTVSIFPPSSEQLTSGGASVVCFLNNFYPKDINVKWKIDGSERQNGVLNSWTDQDSKDSTYSMSSTLTLTKDEYERHNSYTCEATHKTSTSPIVKSFNRNEC

SEQ ID NO: 800 - protein, 119 aa, synthetic construct
  REGION 1..119: note = synthetic
DVQLVESGGGLVQPGGSRKLSCAASGFTFSNFGMHWVRQAPEKGLEWVAFISSGSSSIYYADTVKGRFTISRDNPKNTLFLQMTSLRSEDTAMYYCARMRLDYYAMDYWGQGTSVTVSS

SEQ ID NO: 801 - protein, 5 aa, synthetic construct
  REGION 1..5: note = synthetic
NFGMH

SEQ ID NO: 802 - protein, 17 aa, synthetic construct
  REGION 1..17: note = synthetic
FISSGSSSIYYADTVKG

SEQ ID NO: 803 - protein, 10 aa, synthetic construct
  REGION 1..10: note = synthetic
MRLDYYAMDY

SEQ ID NO: 804 - protein, 107 aa, synthetic construct
  REGION 1..107: note = synthetic
DVQITQSPSYLAASPGETITINCRASKSISKYLAWYQEKPGKTNKLLIYSGSTLQSGIPSRFSGSGSGTDFTLTISSLEPEDFAMYYCQQHNEYPWTFGGGTKLEIK

SEQ ID NO: 805 - protein, 11 aa, synthetic construct
  REGION 1..11: note = synthetic
RASKSISKYLA

SEQ ID NO: 806 - protein, 7 aa, synthetic construct
  REGION 1..7: note = synthetic
SGSTLQS

SEQ ID NO: 807 - protein, 7 aa, synthetic construct
  REGION 1..7: note = synthetic
SGSTLQS

SEQ ID NO: 808 - protein, 119 aa, synthetic construct
  REGION 1..119: note = synthetic
EVQLQQSGPELVKPGASVKISCKTSGYTFTEYTMHWVKQSHGKNLEWIGGINPNNGGTSYNQKFKGRATLTVDKSSSTAYMELRSLTSDDSAVYYCARPGWYNYAMDYWGQGTSVTVSS

SEQ ID NO: 809 - protein, 5 aa, synthetic construct
  REGION 1..5: note = synthetic
EYTMH

SEQ ID NO: 810 - protein, 17 aa, synthetic construct
  REGION 1..17: note = synthetic
GINPNNGGTSYNQKFKG

SEQ ID NO: 811 - protein, 10 aa, synthetic construct
  REGION 1..10: note = synthetic
PGWYNYAMDY

SEQ ID NO: 812 - protein, 107 aa, synthetic construct
  REGION 1..107: note = synthetic
DIVMTQSHKFMSTSVGDRVNITCKASQGVSTAVAWYQQKPGQSPKLLIYSASYRYTGVPDRFTGSGSGTDFTFTISSVQAEDLAVYHCQQHYITPWTFGGGTKLEIK

SEQ ID NO: 813 - protein, 11 aa, synthetic construct
  REGION 1..11: note = synthetic
KASQGVSTAVA

SEQ ID NO: 814 - protein, 7 aa, synthetic construct
  REGION 1..7: note = synthetic
SASYRYT

SEQ ID NO: 815 - protein, 9 aa, synthetic construct
  REGION 1..9: note = synthetic
QQHYITPWT

SEQ ID NO: 816 - protein, 119 aa, synthetic construct
  REGION 1..119: note = synthetic
EVQLVESGGGLVKPGGSLKLSCAASGFAFSDYDMSWVRQTPEKRLEWVAYISDGGYNTYYPDTVKGRFTISRDNAKNTLYLQMSSLKSEDTAIYYCARQILLRYYFDYWGQGTTLTVSS

SEQ ID NO: 817 - protein, 5 aa, synthetic construct
  REGION 1..5: note = synthetic
DYDMS

SEQ ID NO: 818 - protein, 17 aa, synthetic construct
  REGION 1..17: note = synthetic
YISDGGYNTYYPDTVKG

SEQ ID NO: 819 - protein, 10 aa, synthetic construct
  REGION 1..10: note = synthetic
QILLRYYFDY

SEQ ID NO: 820 - protein, 113 aa, synthetic construct
  REGION 1..113: note = synthetic
DIVMSQSPSSLAVSVGEKVTMTCKSSQSLLYSSNQKNYLAWYQQKPGQSPKLLIYWASTRESGVPDRFTGSGSGTDFTLTISSVKAEDLAVYYCQQYHSYPWTFGGGTKLEIK

SEQ ID NO: 821 - protein, 17 aa, synthetic construct
  REGION 1..17: note = synthetic
KSSQSLLYSSNQKNYLA

SEQ ID NO: 822 - protein, 7 aa, synthetic construct
  REGION 1..7: note = synthetic
WASTRES

SEQ ID NO: 823 - protein, 9 aa, synthetic construct
  REGION 1..9: note = synthetic
QQYHSYPWT

SEQ ID NO: 824 - protein, 119 aa, synthetic construct
  REGION 1..119: note = synthetic
EVQLVESGGGLVQPGGSLRLSCAASGFTFSNFGMHWVRQAPGKGLEWVAFISSGSSSIYYADTVKGRFTISRDNAKNSLYLQMNSLRAEDTAVYYCARMRLDYYAMDYWGQGTMVTVSS

SEQ ID NO: 825 - protein, 107 aa, synthetic construct
  REGION 1..107: note = synthetic
DIQMTQSPSSLSASVGDRVTITCRASKSISKYLAWYQQKPGKAPKLLIYSGSTLQSGVPSRFSGSGSGTDFTLTISSLQPEDFATYYCQQHNEYPWTFGGGTKVEIK

SEQ ID NO: 826 - protein, 138 aa, synthetic construct
  REGION 1..138: note = synthetic
MDSRLNLVFLVLILKGVQCEVQLVESGGGLVQPGGSLRLSCAASGFTFSNFGMHWVRQAPGKGLEWVAFISSGSSSIYYADTVKGRFTISRDNAKNSLYLQMNSLRAEDTAVYYCARMRLDYYAMDYWGQGTMVTVSS

SEQ ID NO: 827 - protein, 127 aa, synthetic construct
  REGION 1..127: note = synthetic
MRFQVQVLGLLLLWISGAQCDIQMTQSPSSLSASVGDRVTITCRASKSISKYLAWYQQKPGKAPKLLIYSGSTLQSGVPSRFSGSGSGTDFTLTISSLQPEDFATYYCQQHNEYPWTFGGGTKVEIK

SEQ ID NO: 828 - protein, 119 aa, synthetic construct
  REGION 1..119: note = synthetic
EVQLVESGGGLTQPGKSLKLSCEASGFTFSSFTMHWVRQSPGKGLEWVAFIRSGSGIVFYADAVRGRFTISRDNAKNLLFLQMNDLKSEDTAMYYCARRPLGHNTFDSWGQGTLVTVSS

SEQ ID NO: 829 - protein, 10 aa, synthetic construct
  REGION 1..10: note = sythetic
GFTFSSFTMH

SEQ ID NO: 830 - protein, 17 aa, synthetic construct
  REGION 1..17: note = synthetic
FIRSGSGIVFYADAVRG

SEQ ID NO: 831 - protein, 10 aa, synthetic construct
  REGION 1..10: note = synthetic
RPLGHNTFDS

SEQ ID NO: 832 - protein, 114 aa, synthetic construct
  REGION 1..114: note = synthetic
DIVMTQSPSSLAVSPGEKVTMTCKSSQSLYYSGVKENLLAWYQQKPGQSPKLLIYYASIRFTGVPDRFTGSGSGTDYTLTITSVQAEDMGQYFCQQGINNPLTFGDGTKLEIKR

SEQ ID NO: 833 - protein, 17 aa, synthetic construct
  REGION 1..17: note = synthetic
KSSQSLYYSGVKENLLA

SEQ ID NO: 834 - protein, 6 aa, synthetic construct
  REGION 1..6: note = synthetic
ASIRFT

SEQ ID NO: 835 - protein, 9 aa, synthetic construct
  REGION 1..9: note = synthetic
QQGINNPLT

SEQ ID NO: 836 - protein, 119 aa, synthetic construct
  REGION 1..119: note = synthetic
EVQLQQSGPELVKPGTSMKISCKASGYSFTGHLMNWVKQSHGKNLEWIGLIIPYNGGTSYNQKFKGKATLTVDKSSSTAYMELLSLTSDDSAVYFCSRGLRGFYAMDYWGQGTSVTVSS

SEQ ID NO: 837 - protein, 10 aa, synthetic construct
  REGION 1..10: note = synthetic
GYSFTGHLMN

SEQ ID NO: 838 - protein, 17 aa, synthetic construct
  REGION 1..17: note = synthetic
LIIPYNGGTSYNQKFKG

SEQ ID NO: 839 - protein, 10 aa, synthetic construct
  REGION 1..10: note = synthetic
GLRGFYAMDY

SEQ ID NO: 840 - protein, 112 aa, synthetic construct
  REGION 1..112: note = synthetic
DVVLTQTPLSLSVSFGDQVSISCRSSQSLVNSYGNTFLSWYLHKPGQSPQLLIFGISNRFSGVPDRFSGSGSGTDFTLKISTIKPEDLGMYYCLQGTHQPPTFGPGTKLEVK

SEQ ID NO: 841 - protein, 16 aa, synthetic construct
  REGION 1..16: note = synthetic
RSSQSLVNSYGNTFLS

SEQ ID NO: 842 - protein, 7 aa, synthetic construct
  REGION 1..7: note = synthetic
GISNRFS

SEQ ID NO: 843 - protein, 9 aa, synthetic construct
  REGION 1..9: note = synthetic
LQGTHQPPT

SEQ ID NO: 844 - protein, 9 aa, synthetic construct
  REGION 1..9: note = synthetic
  VARIANT 4: note = X is N, R, D, G, T, Q, S, A or K
  VARIANT 5: note = X is S, H, I, N, L, Y or Q
  VARIANT 8: note = X is M or V
YTFXXYAXH

SEQ ID NO: 845 - protein, 17 aa, synthetic construct
  REGION 1..17: note = synthetic
  VARIANT 1: note = X is W or Y
  VARIANT 3: note = X is H or N
  VARIANT 6: note = X is S,T or A
  VARIANT 7: note = X is G or A
  VARIANT 8: note = X is N, A, T or V
  VARIANT 9: note = X is E, K or L
  SITE 10: note = misc_feature - Xaa can be any naturally occurring amino acid
XIXAGXXXTXYSQKFQG

SEQ ID NO: 846 - protein, 17 aa, synthetic construct
  REGION 1..17: note = synthetic
  VARIANT 6: note = X is S, L, A, K or E
ARGLGXVGPTGTSWFDP

SEQ ID NO: 847 - protein, 11 aa, synthetic construct
  REGION 1..11: note = synthetic
RASQGISSWLA

SEQ ID NO: 848 - protein, 7 aa, synthetic construct
  REGION 1..7: note = synthetic
  VARIANT 5: note = X is L or S
EASSXES

SEQ ID NO: 849 - protein, 9 aa, synthetic construct
  REGION 1..9: note = synthetic
  VARIANT 5: note = X is S, V, Y, L, T
  VARIANT 6: note = X is F, S, Y or G
QQYRXXPFT

SEQ ID NO: 850 - protein, 9 aa, synthetic construct
  REGION 1..9: note = synthetic
  VARIANT 4: note = X is S or N
  VARIANT 5: note = X is E or S
  VARIANT 7: note = X is V or P
GTFXXYXIS

SEQ ID NO: 851 - protein, 17 aa, synthetic construct
  REGION 1..17: note = synthetic
  VARIANT 5: note = X is G, S, I or Y
  VARIANT 6: note = X is A, V or S
  VARIANT 10: note = X is N, I or V
GIIPXXGTAXYAQKFQG

SEQ ID NO: 852 - protein, 9 aa, synthetic construct
  REGION 1..9: note = synthetic
  VARIANT 6: note = X is S, G or F
ARGRHXHET

SEQ ID NO: 853 - protein, 11 aa, synthetic construct
  REGION 1..11: note = synthetic
RASQGISSWLA

SEQ ID NO: 854 - protein, 7 aa, synthetic construct
  REGION 1..7: note = synthetic
AASSLQS

SEQ ID NO: 855 - protein, 9 aa, synthetic construct
  REGION 1..9: note = synthetic
  VARIANT 3: note = X is V or L
  VARIANT 5: note = X is S or R
  VARIANT 6: note = X is L, I or F
QQXYXXPWT

SEQ ID NO: 856 - protein, 9 aa, synthetic construct
  REGION 1..9: note = synthetic
  VARIANT 4: note = X is G, S, P or D or S
  VARIANT 5: note = X is N, S or P
  VARIANT 6: note = X is T, V or Y
  VARIANT 7: note = X is A, H or I
FTFXXXXMS

SEQ ID NO: 857 - protein, 17 aa, synthetic construct
  REGION 1..17: note = synthetic
  VARIANT 4: note = X is G or A
  VARIANT 5: note = X is N, T, E or S
  VARIANT 6: note = X is A or G
  VARIANT 7: note = X is A or G
  VARIANT 8: note = X is S or G
  VARIANT 10: note = X is Y or F
AISXXXXXTXYADSVKG

SEQ ID NO: 858 - protein, 11 aa, synthetic construct
  REGION 1..11: note = synthetic
AKGPDRQVFDY

SEQ ID NO: 859 - protein, 11 aa, synthetic construct
  REGION 1..11: note = synthetic
  VARIANT 7: note = X is S or D
RASQGIXSWLA

SEQ ID NO: 860 - protein, 7 aa, synthetic construct
  REGION 1..7: note = synthetic
AASSLQS

SEQ ID NO: 861 - protein, 9 aa, synthetic construct
  REGION 1..9: note = synthetic
  VARIANT 3: note = X is A or G
  VARIANT 4: note = X is Y, R or L
  VARIANT 5: note = X is S, R, L or F
QHXXXFPYT

SEQ ID NO: 862 - protein, 11 aa, synthetic construct
  REGION 1..11: note = synthetic
  VARIANT 4: note = X is S or F
  VARIANT 6: note = X is S or P
  VARIANT 7: note = X is E or D
  VARIANT 9: note = X is G, P or Y
  VARIANT 11: note = X is G or S
GSIXSXXYXWX

SEQ ID NO: 863 - protein, 16 aa, synthetic construct
  REGION 1..16: note = synthetic
  VARIANT 1: note = X is S or V
  VARIANT 3: note = X is Y, V, F or A
  VARIANT 4: note = X is Y, F or N
  VARIANT 5: note = X is Q, A or S
  VARIANT 7: note = X is S, A or N
XIXXXGXTYYNPSLKS

SEQ ID NO: 864 - protein, 11 aa, synthetic construct
  REGION 1..11: note = synthetic
  VARIANT 5: note = X is Y, H or F
  VARIANT 8: note = X is V or L
ARGPXRQXFDY

SEQ ID NO: 865 - protein, 11 aa, synthetic construct
  REGION 1..11: note = synthetic
RASQGISSWLA

SEQ ID NO: 866 - protein, 7 aa, synthetic construct
  REGION 1..7: note = synthetic
AASSLQS

SEQ ID NO: 867 - protein, 9 aa, synthetic construct
  REGION 1..9: note = synthetic
  VARIANT 4: note = X is S, N, W or F
  VARIANT 5: note = X is S or V
QQGXXFPYT

SEQ ID NO: 868 - protein, 325 aa, synthetic construct
  REGION 1..325: note = synthetic
ASTKGPSVFPLAPCSRSTSESTAALGCLVKDYFPEPVTVSWNSGALTSGVHTFPAVLQSSGLYSLSSVVTVPSSSLGTKTYTCNVDHKPSNTKVDKRVESKYGPPCPPCPAPEFLGGPSVFLFPPKPKDTLMISRTPEVTCVVVDVSQEDPEVQFNWYVDGVEVHNAKTKPREEQFNSTYRVVSVLTVLHQDWLNGKEYKCKVSNKGLPSSIEKTISKAKGQPREPQVYTLPPSQEEMTKNQVSLTCLVKGFYPSDIAVEWESNGQPENNYKTTPPVLDSDGSFFLYSRLTVDKSRWQEGNVFSCSVMHEALHNHYTQKSLSLSG

SEQ ID NO: 869-873 - skipped (5 entries)

SEQ ID NO: 874 - protein, 132 aa, synthetic construct
  REGION 1..132: note = synthetic
EVQLVQSGAEVKKPGESLKISCKGSGYSFTSYWIGWVRQMPGKGLEWMGLIDPTNSDTRYSPSFQGQVTISADKSISTAYLQWSSLKASDTAMYYCAREPSLYVSDTGYPWRGYDYPGFAYWGQGTLVTVSS

SEQ ID NO: 875 - protein, 8 aa, synthetic construct
  REGION 1..8: note = synthetic
GYSFTSYW

SEQ ID NO: 876 - protein, 8 aa, synthetic construct
  REGION 1..8: note = synthetic
IDPTNSDT

SEQ ID NO: 877 - protein, 25 aa, synthetic construct
  REGION 1..25: note = synthetic
AREPSLYVSDTGYPWRGYDYPGFAY

SEQ ID NO: 878 - protein, 456 aa, synthetic construct
  REGION 1..456: note = synthetic
EVQLVQSGAEVKKPGESLKISCKGSGYSFTSYWIGWVRQMPGKGLEWMGLIDPTNSDTRYSPSFQGQVTISADKSISTAYLQWSSLKASDTAMYYCAREPSLYVSDTGYPWRGYDYPGFAYWGQGTLVTVSSAKTTPPSVYPLAPGSAAQTNSMVTLGCLVKGYFPEPVTVTWNSGSLSSGVHTFPAVLQSDLYTLSSSVTVPSSTWPSETVTCNVAHPASSTKVDKKIVPRDCGCKPCICTVPEVSSVFIFPPKPKDVLTITLTPKVTCVVVAISKDDPEVQFSWFVDDVEVHTAQTQPREEQFNSTFRSVSELPIMHQDWLNGKEFKCRVNSAAFPAPIEKTISKTKGRPKAPQVYTIPPPKEQMAKDKVSLTCMITDFFPEDITVEWQWNGQPAENYKNTQPIMDTDGSYFVYSKLNVQKSNWEAGNTFTCSVLHEGLHNHHTEKSLSHSPGK

SEQ ID NO: 879 - protein, 107 aa, synthetic construct
  REGION 1..107: note = synthetic
DIELTQPPSVSVSPGQTASITCSGDNLPSKSVHWYQQKPGQAPVLVIYSYKSERPSGIPERFSGSNSGNTATLTISGTQAEDEADYYCSAYDFTSVVFGGGTKLTVL

SEQ ID NO: 880 - protein, 6 aa, synthetic construct
  REGION 1..6: note = synthetic
NLPSKS

SEQ ID NO: 881 - protein, 6 aa, synthetic construct
  REGION 1..6: note = synthetic
SYKSER

SEQ ID NO: 882 - protein, 9 aa, synthetic construct
  REGION 1..9: note = synthetic
SAYDFTSVV

SEQ ID NO: 883 - protein, 213 aa, synthetic construct
  REGION 1..213: note = synthetic
DIELTQPPSVSVSPGQTASITCSGDNLPSKSVHWYQQKPGQAPVLVIYSYKSERPSGIPERFSGSNSGNTATLTISGTQAEDEADYYCSAYDFTSVVFGGGTKLTVLGQPKSSPSVTLFPPSSEELETNKATLVCTITDFYPGVVTVDWKVDGTPVTQGMETTQPSKQSNNKYMASSYLTLTARAWERHSSYSCQVTHEGHTVEKSLSRADCS

SEQ ID NO: 884 - protein, 127 aa, synthetic construct
  REGION 1..127: note = synthetic
EVQLQESGPGLVKPSQSLSLTCSVTGSSIASDYWGWIRKFPGNKMEWMGFITYSGSTSYNPSLKSRISITRDTSKNQFFLQLHSVTTDDTATYSCARMPSFITLASLSTWEGYFDFWGPGTMVTVSS

SEQ ID NO: 885 - protein, 5 aa, synthetic construct
  REGION 1..5: note = synthetic
SDYWG

SEQ ID NO: 886 - protein, 16 aa, synthetic construct
  REGION 1..16: note = synthetic
FITYSGSTSYNPSLKS

SEQ ID NO: 887 - protein, 19 aa, synthetic construct
  REGION 1..19: note = synthetic
MPSFITLASLSTWEGYFDF

SEQ ID NO: 888 - protein, 106 aa, synthetic construct
  REGION 1..106: note = synthetic
DIQMTQSPSLLSASVGDRVTLNCKASQSIHKNLAWYQQKLGEAPKFLIYYANSLQTGIPSRFSGSGSGTDFTLTISGLQPEDVATYFCQQYYSGWTFGGGTKVELK

SEQ ID NO: 889 - protein, 11 aa, synthetic construct
  REGION 1..11: note = synthetic
KASQSIHKNLA

SEQ ID NO: 890 - protein, 7 aa, synthetic construct
  REGION 1..7: note = synthetic
YANSLQT

SEQ ID NO: 891 - protein, 8 aa, synthetic construct
  REGION 1..8: note = synthetic
QQYYSGWT

SEQ ID NO: 892 - protein, 127 aa, synthetic construct
  REGION 1..127: note = synthetic
EVQLQESGPGLVKPSETLSLTCTVSGGSISSDYWGWIRQPPGKGLEWIGFITYSGSTSYNPSLKSRVTISVDTSKNQFSLKLSSVTAADTAVYYCARMPSFITLASLSTWEGYFDFWGQGTMVTVSS

SEQ ID NO: 893 - protein, 4 aa, synthetic construct
  REGION 1..4: note = synthetic
DYWG

SEQ ID NO: 894 - protein, 16 aa, synthetic construct
  REGION 1..16: note = synthetic
FITYSGSTSYNPSLKS

SEQ ID NO: 895 - protein, 19 aa, synthetic construct
  REGION 1..19: note = synthetic
MPSFITLASLSTWEGYFDF

SEQ ID NO: 896 - protein, 127 aa, synthetic construct
  REGION 1..127: note = synthetic
EVQLQESGPGLVKPSETLSLTCTVSGGSISSDYWGWIRQPPGKGLEWIGFITYSGSTSYNPSLKSRVTISRDTSKNQFSLKLSSVTAADTAVYYCARMPSFITLASLSTWEGYFDFWGQGTMVTVSS

SEQ ID NO: 897 - protein, 5 aa, synthetic construct
  REGION 1..5: note = synthetic
SDYWG

SEQ ID NO: 898 - protein, 16 aa, synthetic construct
  REGION 1..16: note = synthetic
FITYSGSTSYNPSLKS

SEQ ID NO: 899 - protein, 19 aa, synthetic construct
  REGION 1..19: note = synthetic
MPSFITLASLSTWEGYFDF

SEQ ID NO: 900 - protein, 127 aa, synthetic construct
  REGION 1..127: note = synthetic
EVQLQESGPGLVKPSETLSLTCTVSGGSISSDYWGWIRQPPGKGLEWIGFITYSGSTSYNPSLKSRITISRDTSKNQFSLKLSSVTAADTAVYYCARMPSFITLASLSTWEGYFDFWGQGTMVTVSS

SEQ ID NO: 901 - protein, 5 aa, synthetic construct
  REGION 1..5: note = synthetic
SDYWG

SEQ ID NO: 902 - protein, 16 aa, synthetic construct
  REGION 1..16: note = synthetic
FITYSGSTSYNPSLKS

SEQ ID NO: 903 - protein, 19 aa, synthetic construct
  REGION 1..19: note = synthetic
MPSFITLASLSTWEGYFDF

SEQ ID NO: 904 - protein, 127 aa, synthetic construct
  REGION 1..127: note = synthetic
EVQLQESGPGLVKPSETLSLTCTVSGSSISSDYWGWIRQPPGKGLEWMGFITYSGSTSYNPSLKSRITISRDTSKNQFSLKLSSVTAADTAVYYCARMPSFITLASLSTWEGYFDFWGQGTMVTVSS

SEQ ID NO: 905 - protein, 5 aa, synthetic construct
  REGION 1..5: note = synthetic
SDYWG

SEQ ID NO: 906 - protein, 16 aa, synthetic construct
  REGION 1..16: note = synthetic
FITYSGSTSYNPSLKS

SEQ ID NO: 907 - protein, 19 aa, synthetic construct
  REGION 1..19: note = synthetic
MPSFITLASLSTWEGYFDF

SEQ ID NO: 908 - protein, 127 aa, synthetic construct
  REGION 1..127: note = synthetic
EVQLQESGPGLVKPSETLSLTCTVSGGSISSDYWGWIRQPPGKGLEWIGFITYSGSTSYNPSLKSRVTISRDTSKNQFSLKLHSVTAADTAVYYCARMPSFITLASLSTWEGYFDFWGQGTMVTVSS

SEQ ID NO: 909 - protein, 5 aa, synthetic construct
  REGION 1..5: note = synthetic
SDYWG

SEQ ID NO: 910 - protein, 16 aa, synthetic construct
  REGION 1..16: note = synthetic
FITYSGSTSYNPSLKS

SEQ ID NO: 911 - protein, 19 aa, synthetic construct
  REGION 1..19: note = synthetic
MPSFITLASLSTWEGYFDF

SEQ ID NO: 912 - protein, 127 aa, synthetic construct
  REGION 1..127: note = synthetic
EVQLQESGPGLVKPSETLSLTCTVSGGSISSDYWGWIRQPPGKGLEWIGFITYSGSTSYNPSLKSRITISRDTSKNQFSLKLHSVTAADTAVYYCARMPSFITLASLSTWEGYFDFWGQGTMVTVSS

SEQ ID NO: 913 - protein, 5 aa, synthetic construct
  REGION 1..5: note = synthetic
SDYWG

SEQ ID NO: 914 - protein, 17 aa, synthetic construct
  REGION 1..17: note = synthetic
GFITYSGSTSYNPSLKS

SEQ ID NO: 915 - protein, 19 aa, synthetic construct
  REGION 1..19: note = synthetic
MPSFITLASLSTWEGYFDF

SEQ ID NO: 916 - protein, 127 aa, synthetic construct
  REGION 1..127: note = synthetic
EVQLQESGPGLVKPSETLSLTCTVSGSSISSDYWGWIRQPPGKGLEWIGFITYSGSTSYNPSLKSRITISRDTSKNQFSLKLHSVTAADTAVYYCARMPSFITLASLSTWEGYFDFWGQGTMVTVSS

SEQ ID NO: 917 - protein, 5 aa, synthetic construct
  REGION 1..5: note = synthetic
SDYWG

SEQ ID NO: 918 - protein, 16 aa, synthetic construct
  REGION 1..16: note = synthetic
FITYSGSTSYNPSLKS

SEQ ID NO: 919 - protein, 19 aa, synthetic construct
  REGION 1..19: note = synthetic
MPSFITLASLSTWEGYFDF

SEQ ID NO: 920 - protein, 127 aa, synthetic construct
  REGION 1..127: note = synthetic
EVQLQESGPGLVKPSETLSLTCTVSGSSISSDYWGWIRQPPGKGLEWMGFITYSGSTSYNPSLKSRITISVDTSKNQFSLKLHSVTAADTAVYYCARMPSFITLASLSTWEGYFDFWGQGTMVTVSS

SEQ ID NO: 921 - protein, 5 aa, synthetic construct
  REGION 1..5: note = synthetic
SDYWG

SEQ ID NO: 922 - protein, 16 aa, synthetic construct
  REGION 1..16: note = synthetic
FITYSGSTSYNPSLKS

SEQ ID NO: 923 - protein, 19 aa, synthetic construct
  REGION 1..19: note = synthetic
MPSFITLASLSTWEGYFDF

SEQ ID NO: 924 - protein, 127 aa, synthetic construct
  REGION 1..127: note = synthetic
EVQLQESGPGLVKPSETLSLTCAVSGYSISSDYWGWIRQPPGKGLEWIGFITYSGSTSYNPSLKSRVTISVDTSKNQFSLKLSSVTAADTAVYYCARMPSFITLASLSTWEGYFDFWGQGTMVTVSS

SEQ ID NO: 925 - protein, 5 aa, synthetic construct
  REGION 1..5: note = synthetic
SDYWG

SEQ ID NO: 926 - protein, 16 aa, synthetic construct
  REGION 1..16: note = synthetic
FITYSGSTSYNPSLKS

SEQ ID NO: 927 - protein, 19 aa, synthetic construct
  REGION 1..19: note = synthetic
MPSFITLASLSTWEGYFDF

SEQ ID NO: 928 - protein, 127 aa, synthetic construct
  REGION 1..127: note = synthetic
EVQLQESGPGLVKPSETLSLTCAVSGYSISSDYWGWIRQPPGKGLEWIGFITYSGSTSYNPSLKSRVTISRDTSKNQFSLKLSSVTAADTAVYYCARMPSFITLASLSTWEGYFDFWGQGTMVTVSS

SEQ ID NO: 929 - protein, 5 aa, synthetic construct
  REGION 1..5: note = synthetic
SDYWG

SEQ ID NO: 930 - protein, 16 aa, synthetic construct
  REGION 1..16: note = synthetic
FITYSGSTSYNPSLKS

SEQ ID NO: 931 - protein, 19 aa, synthetic construct
  REGION 1..19: note = synthetic
MPSFITLASLSTWEGYFDF

SEQ ID NO: 932 - protein, 127 aa, synthetic construct
  REGION 1..127: note = synthetic
EVQLQESGPGLVKPSETLSLTCAVSGYSISSDYWGWIRQPPGKGLEWIGFITYSGSTSYNPSLKSRITISRDTSKNQFSLKLSSVTAADTAVYYCARMPSFITLASLSTWEGYFDFWGQGTMVTVSS

SEQ ID NO: 933 - protein, 5 aa, synthetic construct
  REGION 1..5: note = synthetic
SDYWG

SEQ ID NO: 934 - protein, 16 aa, synthetic construct
  REGION 1..16: note = synthetic
FITYSGSTSYNPSLKS

SEQ ID NO: 935 - protein, 19 aa, synthetic construct
  REGION 1..19: note = synthetic
MPSFITLASLSTWEGYFDF

SEQ ID NO: 936 - protein, 127 aa, synthetic construct
  REGION 1..127: note = synthetic
EVQLQESGPGLVKPSETLSLTCAVSGSSISSDYWGWIRQPPGKGLEWMGFITYSGSTSYNPSLKSRITISRDTSKNQFSLKLSSVTAADTAVYYCARMPSFITLASLSTWEGYFDFWGQGTMVTVSS

SEQ ID NO: 937 - protein, 5 aa, synthetic construct
  REGION 1..5: note = sythetic
SDYWG

SEQ ID NO: 938 - protein, 16 aa, synthetic construct
  REGION 1..16: note = synthetic
FITYSGSTSYNPSLKS

SEQ ID NO: 939 - protein, 19 aa, synthetic construct
  REGION 1..19: note = synthetic
MPSFITLASLSTWEGYFDF

SEQ ID NO: 940 - protein, 127 aa, synthetic construct
  REGION 1..127: note = synthetic
EVQLQESGPGLVKPSETLSLTCAVSGYSISSDYWGWIRQPPGKGLEWIGFITYSGSTSYNPSLKSRVTISRDTSKNQFSLKLHSVTAADTAVYYCARMPSFITLASLSTWEGYFDFWGQGTMVTVSS

SEQ ID NO: 941 - protein, 5 aa, synthetic construct
  REGION 1..5: note = synthetic
SDYWG

SEQ ID NO: 942 - protein, 16 aa, synthetic construct
  REGION 1..16: note = synthetic
FITYSGSTSYNPSLKS

SEQ ID NO: 943 - protein, 19 aa, synthetic construct
  REGION 1..19: note = synthetic
MPSFITLASLSTWEGYFDF

SEQ ID NO: 944 - protein, 127 aa, synthetic construct
  REGION 1..127: note = synthetic
EVQLQESGPGLVKPSETLSLTCAVSGYSISSDYWGWIRQPPGKGLEWIGFITYSGSTSYNPSLKSRITISRDTSKNQFSLKLHSVTAADTAVYYCARMPSFITLASLSTWEGYFDFWGQGTMVTVSS

SEQ ID NO: 945 - protein, 5 aa, synthetic construct
  REGION 1..5: note = synthetic
SDYWG

SEQ ID NO: 946 - protein, 16 aa, synthetic construct
  REGION 1..16: note = synthetic
FITYSGSTSYNPSLKS

SEQ ID NO: 947 - protein, 19 aa, synthetic construct
  REGION 1..19: note = synthetic
MPSFITLASLSTWEGYFDF

SEQ ID NO: 948 - protein, 129 aa, synthetic construct
  REGION 1..129: note = synthetic
EVQLQESGPGLVKPSETLSLTCTVSGSSIASDYWGWIRQPPGKGLEWIGFITYSGSTSYNPSLKSRVTISVDTSKNQFSLKLSSVTAADTAVYYCARMPSFITLASLSTWEGYFDFWGQGTMVTVSSAS

SEQ ID NO: 949 - protein, 5 aa, synthetic construct
  REGION 1..5: note = synthetic
SDYWG

SEQ ID NO: 950 - protein, 16 aa, synthetic construct
  REGION 1..16: note = synthetic
FITYSGSTSYNPSLKS

SEQ ID NO: 951 - protein, 19 aa, synthetic construct
  REGION 1..19: note = synthetic
MPSFITLASLSTWEGYFDF

SEQ ID NO: 952 - protein, 127 aa, synthetic construct
  REGION 1..127: note = synthetic
EVQLQESGPGLVKPSETLSLTCTVSGSSIASDYWGWIRQPPGKGLEWIGFITYSGSTSYNPSLKSRVTISRDTSKNQFSLKLSSVTAADTAVYYCARMPSFITLASLSTWEGYFDFWGQGTMVTVSS

SEQ ID NO: 953 - protein, 5 aa, synthetic construct
  REGION 1..5: note = synthetic
SDYWG

SEQ ID NO: 954 - protein, 16 aa, synthetic construct
  REGION 1..16: note = synthetic
FITYSGSTSYNPSLKS

SEQ ID NO: 955 - protein, 19 aa, synthetic construct
  REGION 1..19: note = synthetic
MPSFITLASLSTWEGYFDF

SEQ ID NO: 956 - protein, 127 aa, synthetic construct
  REGION 1..127: note = synthetic
EVQLQESGPGLVKPSETLSLTCTVSGSSIASDYWGWIRKPPGKGLEWIGFITYSGSTSYNPSLKSRVTISRDTSKNQFSLKLSSVTAADTAVYYCARMPSFITLASLSTWEGYFDFWGQGTMVTVSS

SEQ ID NO: 957 - protein, 5 aa, synthetic construct
  REGION 1..5: note = synthetic
SDYWG

SEQ ID NO: 958 - protein, 16 aa, synthetic construct
  REGION 1..16: note = synthetic
FITYSGSTSYNPSLKS

SEQ ID NO: 959 - protein, 19 aa, synthetic construct
  REGION 1..19: note = synthetic
MPSFITLASLSTWEGYFDF

SEQ ID NO: 960 - protein, 127 aa, synthetic construct
  REGION 1..127: note = synthetic
EVQLQESGPGLVKPSETLSLTCTVSGSSIASDYWGWIRQPPGKKLEWIGFITYSGSTSYNPSLKSRVTISRDTSKNQFSLKLSSVTAADTAVYYCARMPSFITLASLSTWEGYFDFWGQGTMVTVSS

SEQ ID NO: 961 - protein, 5 aa, synthetic construct
  REGION 1..5: note = synthetic
SDYWG

SEQ ID NO: 962 - protein, 16 aa, synthetic construct
  REGION 1..16: note = synthetic
FITYSGSTSYNPSLKS

SEQ ID NO: 963 - protein, 19 aa, synthetic construct
  REGION 1..19: note = synthetic
MPSFITLASLSTWEGYFDF

SEQ ID NO: 964 - protein, 127 aa, synthetic construct
  REGION 1..127: note = synthetic
EVQLQESGPGLVKPSETLSLTCTVSGSSIASDYWGWIRQPPGKGMEWIGFITYSGSTSYNPSLKSRVTISRDTSKNQFSLKLSSVTAADTAVYYCARMPSFITLASLSTWEGYFDFWGQGTMVTVSS

SEQ ID NO: 965 - protein, 5 aa, synthetic construct
  REGION 1..5: note = synthetic
SDYWG

SEQ ID NO: 966 - protein, 16 aa, synthetic construct
  REGION 1..16: note = synthetic
FITYSGSTSYNPSLKS

SEQ ID NO: 967 - protein, 19 aa, synthetic construct
  REGION 1..19: note = synthetic
MPSFITLASLSTWEGYFDF

SEQ ID NO: 968 - protein, 127 aa, synthetic construct
  REGION 1..127: note = synthetic
EVQLQESGPGLVKPSETLSLTCTVSGSSIASDYWGWIRKPPGKKMEWIGFITYSGSTSYNPSLKSRVTISRDTSKNQFSLKLSSVTAADTAVYYCARMPSFITLASLSTWEGYFDFWGQGTMVTVSS

SEQ ID NO: 969 - protein, 5 aa, synthetic construct
  REGION 1..5: note = synthetic
SDYWG

SEQ ID NO: 970 - protein, 16 aa, synthetic construct
  REGION 1..16: note = synthetic
FITYSGSTSYNPSLKS

SEQ ID NO: 971 - protein, 19 aa, synthetic construct
  REGION 1..19: note = synthetic
MPSFITLASLSTWEGYFDF

SEQ ID NO: 972 - protein, 127 aa, synthetic construct
  REGION 1..127: note = synthetic
EVQLQESGPGLVKPSETLSLTCTVSGSSIASDYWGWIRQFPGKGLEWIGFITYSGSTSYNPSLKSRVTISRDTSKNQFSLKLSSVTADDTAVYYCARMPSFITLASLSTWEGYFDFWGQGTMVTVSS

SEQ ID NO: 973 - protein, 5 aa, synthetic construct
  REGION 1..5: note = synthetic
SDYWG

SEQ ID NO: 974 - protein, 16 aa, synthetic construct
  REGION 1..16: note = synthetic
FITYSGSTSYNPSLKS

SEQ ID NO: 975 - protein, 19 aa, synthetic construct
  REGION 1..19: note = synthetic
MPSFITLASLSTWEGYFDF

SEQ ID NO: 976 - protein, 127 aa, synthetic construct
  REGION 1..127: note = synthetic
EVQLQESGPGLVKPSETLSLTCTVSGSSIASDYWGWIRKPPGKKMEWIGFITYSGSTSYNPSLKSRVTISVDTSKNQFSLKLSSVTAADTAVYYCARMPSFITLASLSTWEGYFDFWGQGTMVTVSS

SEQ ID NO: 977 - protein, 5 aa, synthetic construct
  REGION 1..5: note = synthetic
SDYWG

SEQ ID NO: 978 - protein, 16 aa, synthetic construct
  REGION 1..16: note = synthetic
FITYSGSTSYNPSLKS

SEQ ID NO: 979 - protein, 19 aa, synthetic construct
  REGION 1..19: note = synthetic
MPSFITLASLSTWEGYFDF

SEQ ID NO: 980 - protein, 127 aa, synthetic construct
  REGION 1..127: note = synthetic
EVQLQESGPGLVKPSETLSLTCSVTGSSIASDYWGWIRQPPGKGLEWIGFITYSGSTSYNPSLKSRVTISRDTSKNQFSLKLSSVTAADTAVYYCARMPSFITLASLSTWEGYFDFWGQGTMVTVSS

SEQ ID NO: 981 - protein, 5 aa, synthetic construct
  REGION 1..5: note = synthetic
SDYWG

SEQ ID NO: 982 - protein, 16 aa, synthetic construct
  REGION 1..16: note = synthetic
FITYSGSTSYNPSLKS

SEQ ID NO: 983 - protein, 19 aa, synthetic construct
  REGION 1..19: note = synthetic
MPSFITLASLSTWEGYFDF

SEQ ID NO: 984 - protein, 127 aa, synthetic construct
  REGION 1..127: note = synthetic
EVQLQQSGAGLLKPSETLSLTCSVTGSSIASDYWGWIRQPPGKGLEWIGFITYSGSTSYNPSLKSRVTISVDTSKNQFSLKLSSVTAADTAVYYCARMPSFITLASLSTWEGYFDFWGQGTMVTVSS

SEQ ID NO: 985 - protein, 5 aa, synthetic construct
  REGION 1..5: note = synthetic
SDYWG

SEQ ID NO: 986 - protein, 16 aa, synthetic construct
  REGION 1..16: note = synthetic
FITYSGSTSYNPSLKS

SEQ ID NO: 987 - protein, 19 aa, synthetic construct
  REGION 1..19: note = synthetic
MPSFITLASLSTWEGYFDF

SEQ ID NO: 988 - protein, 127 aa, synthetic construct
  REGION 1..127: note = synthetic
EVQLQESGPGLVKPPGTLSLTCSVTGSSIASDYWGWVRQPPGKGLEWIGFITYSGSTSYNPSLKSRVTISVDTSKNQFSLKLSSVTAADTAVYYCARMPSFITLASLSTWEGYFDFWGQGTMVTVSS

SEQ ID NO: 989 - protein, 5 aa, synthetic construct
  REGION 1..5: note = synthetic
SDYWG

SEQ ID NO: 990 - protein, 16 aa, synthetic construct
  REGION 1..16: note = synthetic
FITYSGSTSYNPSLKS

SEQ ID NO: 991 - protein, 19 aa, synthetic construct
  REGION 1..19: note = synthetic
MPSFITLASLSTWEGYFDF

SEQ ID NO: 992 - protein, 127 aa, synthetic construct
  REGION 1..127: note = synthetic
EVQLQESGPGLVKPSETLSLTCAVSGSSISSDYWGWIRQPPGKGLEWIGFITYSGSTSYNPSLKSRITISRDTSKNQFSLKLHSVTAADTAVYYCARMPSFITLASLSTWEGYFDFWGQGTMVTVSS

SEQ ID NO: 993 - protein, 5 aa, synthetic construct
  REGION 1..5: note = synthetic
SDYWG

SEQ ID NO: 994 - protein, 16 aa, synthetic construct
  REGION 1..16: note = synthetic
FITYSGSTSYNPSLKS

SEQ ID NO: 995 - protein, 19 aa, synthetic construct
  REGION 1..19: note = synthetic
MPSFITLASLSTWEGYFDF

SEQ ID NO: 996 - protein, 127 aa, synthetic construct
  REGION 1..127: note = synthetic
EVQLQESGPGLVKPSETLSLTCAVSGSSISSDYWGWIRQPPGKGLEWMGFITYSGSTSYNPSLKSRITISRDTSKNQFSLKLHSVTAADTAVYYCARMPSFITLASLSTWEGYFDFWGQGTMVTVSS

SEQ ID NO: 997 - protein, 5 aa, synthetic construct
  REGION 1..5: note = synthetic
SDYWG

SEQ ID NO: 998 - protein, 16 aa, synthetic construct
  REGION 1..16: note = synthetic
FITYSGSTSYNPSLKS

SEQ ID NO: 999 - protein, 19 aa, synthetic construct
  REGION 1..19: note = synthetic
MPSFITLASLSTWEGYFDF

SEQ ID NO: 1000 - protein, 106 aa, synthetic construct
  REGION 1..106: note = synthentic
DIQMTQSPSSLSASVGDRVTITCKASQSIHKNLAWYQQKPGKAPKLLIYYANSLQTGVPSRFSGSGSGTDFTLTISSLQPEDFATYYCQQYYSGWTFGGGTKVEIK

SEQ ID NO: 1001 - protein, 12 aa, synthetic construct
  REGION 1..12: note = synthetic
KASQSIHKNLAW

SEQ ID NO: 1002 - protein, 7 aa, synthetic construct
  REGION 1..7: note = synthetic
YANSLQT

SEQ ID NO: 1003 - protein, 8 aa, synthetic construct
  REGION 1..8: note = synthetic
QQYYSGWT

SEQ ID NO: 1004 - protein, 106 aa, synthetic construct
  REGION 1..106: note = synthetic
DIQMTQSPSSLSASVGDRVTITCKASQSIHKNLAWYQQKPGKAPKFLIYYANSLQTGVPSRFSGSGSGTDFTLTISSLQPEDFATYYCQQYYSGWTFGGGTKVEIK

SEQ ID NO: 1005 - protein, 12 aa, synthetic construct
  REGION 1..12: note = synthetic
KASQSIHKNLAW

SEQ ID NO: 1006 - protein, 7 aa, synthetic construct
  REGION 1..7: note = synthetic
YANSLQT

SEQ ID NO: 1007 - protein, 8 aa, synthetic construct
  REGION 1..8: note = synthetic
QQYYSGWT

SEQ ID NO: 1008 - protein, 106 aa, synthetic construct
  REGION 1..106: note = synthetic
DIQMTQSPSSLSASVGDRVTITCKASQSIHKNLAWYQQKPGKAPKFLIYYANSLQTGIPSRFSGSGSGTDFTLTISSLQPEDFATYYCQQYYSGWTFGGGTKVEIK

SEQ ID NO: 1009 - protein, 12 aa, synthetic construct
  REGION 1..12: note = synthetic
KASQSIHKNLAW

SEQ ID NO: 1010 - protein, 7 aa, synthetic construct
  REGION 1..7: note = synthetic
YANSLQT

SEQ ID NO: 1011 - protein, 8 aa, synthetic construct
  REGION 1..8: note = synthetic
QQYYSGWT

SEQ ID NO: 1012 - protein, 106 aa, synthetic construct
  REGION 1..106: note = synthetic
DIQMTQSPSSLSASVGDRVTITCKASQSIHKNLAWYQQKPGKVPKLLIYYANSLQTGVPSRFSGSGSGTDFTLTISSLQPEDVATYYCQQYYSGWTFGGGTKVEIK

SEQ ID NO: 1013 - protein, 12 aa, synthetic construct
  REGION 1..12: note = synthetic
KASQSIHKNLAW

SEQ ID NO: 1014 - protein, 7 aa, synthetic construct
  REGION 1..7: note = synthetic
YANSLQT

SEQ ID NO: 1015 - protein, 8 aa, synthetic construct
  REGION 1..8: note = synthetic
QQYYSGWT

SEQ ID NO: 1016 - protein, 106 aa, synthetic construct
  REGION 1..106: note = synthetic
DIQMTQSPSSLSASVGDRVTITCKASQSIHKNLAWYQQKPGKVPKFLIYYANSLQTGVPSRFSGSGSGTDFTLTISSLQPEDVATYYCQQYYSGWTFGGGTKVEIK

SEQ ID NO: 1017 - protein, 12 aa, synthetic construct
  REGION 1..12: note = synthetic
KASQSIHKNLAW

SEQ ID NO: 1018 - protein, 7 aa, synthetic construct
  REGION 1..7: note = synthetic
YANSLQT

SEQ ID NO: 1019 - protein, 8 aa, synthetic construct
  REGION 1..8: note = synthetic
QQYYSGWT

SEQ ID NO: 1020 - protein, 106 aa, synthetic construct
  REGION 1..106: note = synthetic
DIQMTQSPSSLSASVGDRVTITCKASQSIHKNLAWYQQKPGKVPKFLIYYANSLQTGIPSRFSGSGSGTDFTLTISSLQPEDVATYYCQQYYSGWTFGGGTKVEIK

SEQ ID NO: 1021 - protein, 12 aa, synthetic construct
  REGION 1..12: note = synthetic
KASQSIHKNLAW

SEQ ID NO: 1022 - protein, 7 aa, synthetic construct
  REGION 1..7: note = synthetic
YANSLQT

SEQ ID NO: 1023 - protein, 8 aa, synthetic construct
  REGION 1..8: note = sythetic
QQYYSGWT

SEQ ID NO: 1024 - protein, 106 aa, synthetic construct; identical to SEQ ID NO: 1000
  REGION 1..106: note = synthetic

SEQ ID NO: 1025 - protein, 12 aa, synthetic construct
  REGION 1..12: note = synthetic
KASQSIHKNLAW

SEQ ID NO: 1026 - protein, 7 aa, synthetic construct
  REGION 1..7: note = synthetic
YANSLQT

SEQ ID NO: 1027 - protein, 8 aa, synthetic construct
  REGION 1..8: note = synthetic
QQYYSGWT

SEQ ID NO: 1028 - protein, 106 aa, synthetic construct; identical to SEQ ID NO: 1004
  REGION 1..106: note = synthetic

SEQ ID NO: 1029 - protein, 12 aa, synthetic construct
  REGION 1..12: note = synthetic
KASQSIHKNLAW

SEQ ID NO: 1030 - protein, 7 aa, synthetic construct
  REGION 1..7: note = synthetic
YANSLQT

SEQ ID NO: 1031 - protein, 8 aa, synthetic construct
  REGION 1..8: note = synthetic
QQYYSGWT

SEQ ID NO: 1032 - protein, 106 aa, synthetic construct
  REGION 1..106: note = synthetic
DIQMTQSPSSLSASVGDRVTITCKASQSIHKNLAWYQQKPGKAPKLLIYYANSLQTGVPSRFSGSGSGTDFTLTISSLQPEDFATYFCQQYYSGWTFGGGTKVEIK

SEQ ID NO: 1033 - protein, 12 aa, synthetic construct
  REGION 1..12: note = synthetic
KASQSIHKNLAW

SEQ ID NO: 1034 - protein, 7 aa, synthetic construct
  REGION 1..7: note = synthetic
YANSLQT

SEQ ID NO: 1035 - protein, 8 aa, synthetic construct
  REGION 1..8: note = synthetic
QQYYSGWT

SEQ ID NO: 1036 - protein, 106 aa, synthetic construct
  REGION 1..106: note = synthetic
DIQMTQSPSSLSASVGDRVTITCKASQSIHKNLAWYQQKPGKAPKFLIYYANSLQTGVPSRFSGSGSGTDFTLTISSLQPEDFATYFCQQYYSGWTFGGGTKVEIK

SEQ ID NO: 1037 - protein, 12 aa, synthetic construct
  REGION 1..12: note = synthetic
KASQSIHKNLAW

SEQ ID NO: 1038 - protein, 7 aa, synthetic construct
  REGION 1..7: note = synthetic
YANSLQT

SEQ ID NO: 1039 - protein, 8 aa, synthetic construct
  REGION 1..8: note = synthetic
QQYYSGWT

SEQ ID NO: 1040 - protein, 106 aa, synthetic construct
  REGION 1..106: note = synthetic
DIQMTQSPSSLSASVGDRVTITCKASQSIHKNLAWYQQKPGKAPKLLIYYANSLQTGIPSRFSGSGSGTDFTLTISSLQPEDFATYYCQQYYSGWTFGGGTKVEIK

SEQ ID NO: 1041 - protein, 12 aa, synthetic construct
  REGION 1..12: note = synthetic
KASQSIHKNLAW

SEQ ID NO: 1042 - protein, 7 aa, synthetic construct
  REGION 1..7: note = synthetic
YANSLQT

SEQ ID NO: 1043 - protein, 8 aa, synthetic construct
  REGION 1..8: note = synthetic
QQYYSGWT

SEQ ID NO: 1044 - protein, 121 aa, synthetic construct
  REGION 1..121: note = synthetic
DVQLQESGPGLVKPSQSLSLTCTVTGYSITSDYAWNWIRQFPGNKLEWMGYISNSGSASYNPSLKSRISITRDTSKNQFFLQLNSVTTEDTATYYCATLIYYDYGGAMNFWGQGTSVTVSS

SEQ ID NO: 1045 - protein, 11 aa, synthetic construct
  REGION 1..11: note = synthetic
GYSITSDYAWN

SEQ ID NO: 1046 - protein, 16 aa, synthetic construct
  REGION 1..16: note = synthetic
YISNSGSASYNPSLKS

SEQ ID NO: 1047 - protein, 12 aa, synthetic construct
  REGION 1..12: note = synthetic
LIYYDYGGAMNF

SEQ ID NO: 1048 - protein, 107 aa, synthetic construct
  REGION 1..107: note = synthetic
DIVMTQSHKFMSTSVGDRVSITCKASQGVSTTVAWYQQKPGQSPKLLIYSASYRYTGVPDRFTGSGSGTDFTFTISSVQSEDLAVYYCQHYYSTPWTFGGGTKLEIK

SEQ ID NO: 1049 - protein, 11 aa, synthetic construct
  REGION 1..11: note = synthetic
KASQGVSTTVA

SEQ ID NO: 1050 - protein, 7 aa, synthetic construct
  REGION 1..7: note = synthetic
SASYRYT

SEQ ID NO: 1051 - protein, 9 aa, synthetic construct
  REGION 1..9: note = synthetic
QHYYSTPWT

SEQ ID NO: 1052 - protein, 7 aa, synthetic construct
  REGION 1..7: note = synthetic
YASNLQT

SEQ ID NO: 1053 - protein, 7 aa, synthetic construct
  REGION 1..7: note = synthetic
YASSLQT

SEQ ID NO: 1054 - protein, 7 aa, synthetic construct
  REGION 1..7: note = synthetic
YASTLQT

SEQ ID NO: 1055 - protein, 7 aa, synthetic construct
  REGION 1..7: note = synthetic
YATTLQT

SEQ ID NO: 1056 - protein, 7 aa, synthetic construct
  REGION 1..7: note = synthetic
YASYLQT

SEQ ID NO: 1057 - protein, 7 aa, synthetic construct
  REGION 1..7: note = synthetic
YANQLQT

SEQ ID NO: 1058 - protein, 7 aa, synthetic construct
  REGION 1..7: note = synthetic
YAGSLQT

SEQ ID NO: 1059 - protein, 7 aa, synthetic construct
  REGION 1..7: note = synthetic
YASQLQT

SEQ ID NO: 1060 - protein, 7 aa, synthetic construct
  REGION 1..7: note = synthetic
YADSLQT

SEQ ID NO: 1061 - protein, 107 aa, synthetic construct; identical to SEQ ID NO: 1048
  REGION 1..107: note = synthetic

SEQ ID NO: 1062 - protein, 11 aa, synthetic construct
  REGION 1..11: note = synthetic
KASQGVSTTVA

SEQ ID NO: 1063 - protein, 7 aa, synthetic construct
  REGION 1..7: note = synthetic
SASYRYT

SEQ ID NO: 1064 - protein, 9 aa, synthetic construct
  REGION 1..9: note = synthetic
QHYYSTPWT

SEQ ID NO: 1065 - protein, 8 aa, synthetic construct
  REGION 1..8: note = synthetic
QQYYSGFT

SEQ ID NO: 1066 - protein, 8 aa, synthetic construct
  REGION 1..8: note = synthetic
QQYYSGYT

SEQ ID NO: 1067 - protein, 8 aa, synthetic construct
  REGION 1..8: note = synthetic
QQYYSGIT

SEQ ID NO: 1068 - protein, 8 aa, synthetic construct
  REGION 1..8: note = synthetic
QQYYSGVT

SEQ ID NO: 1069 - protein, 8 aa, synthetic construct
  REGION 1..8: note = synthetic
QQYYSGLT

SEQ ID NO: 1070 - protein, 121 aa, synthetic construct; identical to SEQ ID NO: 1044
  REGION 1..121: note = synthetic

SEQ ID NO: 1071 - protein, 11 aa, synthetic construct
  REGION 1..11: note = synthetic
GYSITSDYAWN

SEQ ID NO: 1072 - protein, 16 aa, synthetic construct
  REGION 1..16: note = synthetic
YISNSGSASYNPSLKS

SEQ ID NO: 1073 - protein, 12 aa, synthetic construct
  REGION 1..12: note = synthetic
LIYYDYGGAMNF

SEQ ID NO: 1074 - protein, 19 aa, synthetic construct
  REGION 1..19: note = synthetic
MPSFITLASLSTFEGYFDF

SEQ ID NO: 1075 - protein, 19 aa, synthetic construct
  REGION 1..19: note = synthetic
MPSFITLASLSTYEGYFDF

SEQ ID NO: 1076 - protein, 19 aa, synthetic construct
  REGION 1..19: note = synthetic
MPSFITLASLSTIEGYFDF

SEQ ID NO: 1077 - protein, 19 aa, synthetic construct
  REGION 1..19: note = synthetic
MPSFITLASLSTVEGYFDF

SEQ ID NO: 1078 - protein, 19 aa, synthetic construct
  REGION 1..19: note = synthetic
MPSFITLASLSTLEGYFDF

SEQ ID NO: 1079 - protein, 119 aa, synthetic construct; identical to SEQ ID NO: 410
  REGION 1..119: note = synthetic

SEQ ID NO: 1080 - protein, 5 aa, synthetic construct
  REGION 1..5: note = synthetic
SYVMH

SEQ ID NO: 1081 - protein, 16 aa, synthetic construct
  REGION 1..16: note = synthetic
YIDPYNDGAKYNEKFK

SEQ ID NO: 1082 - protein, 9 aa, synthetic construct
  REGION 1..9: note = synthetic
GPYGWYFDV

SEQ ID NO: 1083 - protein, 16 aa, synthetic construct
  REGION 1..16: note = synthetic
YIDPYNRGAKYNEKFG

SEQ ID NO: 1084 - protein, 16 aa, synthetic construct
  REGION 1..16: note = synthetic
YIDPYNLGAKYNEKFG

SEQ ID NO: 1085 - protein, 16 aa, synthetic construct
  REGION 1..16: note = synthetic
YIDPYNKGAKYNEKFG

SEQ ID NO: 1086 - protein, 16 aa, synthetic construct
  REGION 1..16: note = synthetic
YIDPYNFGAKYNEKFG

SEQ ID NO: 1087 - protein, 16 aa, synthetic construct
  REGION 1..16: note = synthetic
YIDPYNSGAKYNEKFG

SEQ ID NO: 1088 - protein, 16 aa, synthetic construct
  REGION 1..16: note = synthetic
YIDPYNYGAKYNEKFG

SEQ ID NO: 1089 - protein, 16 aa, synthetic construct
  REGION 1..16: note = synthetic
YIDPYNVGAKYNEKFG

SEQ ID NO: 1090 - protein, 17 aa, synthetic construct
  REGION 1..17: note = synthetic
YIDPYNDRAKYNEKFKG

SEQ ID NO: 1091 - protein, 17 aa, synthetic construct
  REGION 1..17: note = synthetic
YIDPYNDNAKYNEKFKG

SEQ ID NO: 1092 - protein, 17 aa, synthetic construct
  REGION 1..17: note = synthetic
YIDPYNDQAKYNEKFKG

SEQ ID NO: 1093 - protein, 17 aa, synthetic construct
  REGION 1..17: note = synthetic
YIDPYNDEAKYNEKFKG

SEQ ID NO: 1094 - protein, 17 aa, synthetic construct
  REGION 1..17: note = synthetic
YIDPYNDLAKYNEKFKG

SEQ ID NO: 1095 - protein, 17 aa, synthetic construct
  REGION 1..17: note = synthetic
YIDPYNDKAKYNEKFKG

SEQ ID NO: 1096 - protein, 17 aa, synthetic construct
  REGION 1..17: note = synthetic
YIDPYNDSAKYNEKFKG

SEQ ID NO: 1097 - protein, 17 aa, synthetic construct
  REGION 1..17: note = synthetic
YIDPYNDYAKYNEKFKG

SEQ ID NO: 1098 - protein, 17 aa, synthetic construct
  REGION 1..17: note = synthetic
YIDPYNDVAKYNEKFKG

SEQ ID NO: 1099 - protein, 107 aa, synthetic construct; identical to SEQ ID NO: 415
  REGION 1..107: note = synthetic

SEQ ID NO: 1100 - protein, 11 aa, synthetic construct
  REGION 1..11: note = synthetic
RASEHIYSYLS

SEQ ID NO: 1101 - protein, 7 aa, synthetic construct
  REGION 1..7: note = synthetic
NAKTLAE

SEQ ID NO: 1102 - protein, 9 aa, synthetic construct
  REGION 1..9: note = synthetic
QHHFGSPLT

SEQ ID NO: 1103 - protein, 7 aa, synthetic construct
  REGION 1..7: note = synthetic
AAKTLAE

SEQ ID NO: 1104 - protein, 7 aa, synthetic construct
  REGION 1..7: note = synthetic
YAKTLAE

SEQ ID NO: 1105 - protein, 7 aa, synthetic construct
  REGION 1..7: note = synthetic
WAKTLAE

SEQ ID NO: 1106 - protein, 7 aa, synthetic construct
  REGION 1..7: note = synthetic
SAKTLAE

SEQ ID NO: 1107 - protein, 7 aa, synthetic construct
  REGION 1..7: note = synthetic
TAKTLAE

SEQ ID NO: 1108 - protein, 7 aa, synthetic construct
  REGION 1..7: note = synthetic
IAKTLAE

SEQ ID NO: 1109 - protein, 7 aa, synthetic construct
  REGION 1..7: note = synthetic
VAKTLAE

SEQ ID NO: 1110 - protein, 7 aa, synthetic construct
  REGION 1..7: note = synthetic
NNKTLAE

SEQ ID NO: 1111 - protein, 7 aa, synthetic construct
  REGION 1..7: note = synthetic
NIKTLAE

SEQ ID NO: 1112 - protein, 7 aa, synthetic construct
  REGION 1..7: note = synthetic
NLLTLAE

SEQ ID NO: 1113 - protein, 7 aa, synthetic construct
  REGION 1..7: note = synthetic
NTKTLAE

SEQ ID NO: 1114 - protein, 7 aa, synthetic construct
  REGION 1..7: note = synthetic
NVKTLAE

SEQ ID NO: 1115 - protein, 119 aa, synthetic construct
  REGION 1..119: note = synthetic
EVQLVQSGAEVKKPGASVKVSCKASGYTFSSYVMHWVRQAPGQRLEWIGYIDPYNDGAKYSQKFQGRVTLTRDTSASTAYMELSSLRSEDTAVYYCARGGPYGWYFDVWGQGTTVTVSS

SEQ ID NO: 1116 - protein, 6 aa, synthetic construct
  REGION 1..6: note = synthetic
SYVMHW

SEQ ID NO: 1117 - protein, 16 aa, synthetic construct
  REGION 1..16: note = synthetic
YIDPYNDGAKYSQKFQ

SEQ ID NO: 1118 - protein, 10 aa, synthetic construct
  REGION 1..10: note = synthetic
GGPYGWYFDV

SEQ ID NO: 1119 - protein, 119 aa, synthetic construct
  REGION 1..119: note = synthetic
EVQLVQSGAEVKKPGASVKVSCKASGYTFSSYVMHWVRQAPGQRLEWIGYIDPYNDGAKYSQKFQGRVTLTSDKSASTAYMELSSLRSEDTAVYYCARGGPYGWYFDVWGQGTTVTVSS

SEQ ID NO: 1120 - protein, 5 aa, synthetic construct
  REGION 1..5: note = synthetic
SYVMH

SEQ ID NO: 1121 - protein, 16 aa, synthetic construct
  REGION 1..16: note = synthetic
YIDPYNDGAKYSQKFQ

SEQ ID NO: 1122 - protein, 10 aa, synthetic construct
  REGION 1..10: note = synthetic
GGPYGWYFDV

SEQ ID NO: 1123 - protein, 119 aa, synthetic construct
  REGION 1..119: note = synthetic
EVQLVQSGAEVKKPGASVKVSCKASGYTFSSYVMHWVRQAPGQGLEWIGYIDPYNDGAKYAQKFQGRVTLTRDTSTSTVYMELSSLRSEDTAVYYCARGGPYGWYFDVWGQGTTVTVSS

SEQ ID NO: 1124 - protein, 5 aa, synthetic construct
  REGION 1..5: note = synthetic
SYVMH

SEQ ID NO: 1125 - protein, 13 aa, synthetic construct
  REGION 1..13: note = synthetic
YIDPYNDGAKYAQ

SEQ ID NO: 1126 - protein, 10 aa, synthetic construct
  REGION 1..10: note = synthetic
GGPYGWYFDV

SEQ ID NO: 1127 - protein, 119 aa, synthetic construct
  REGION 1..119: note = synthetic
EVQLVQSGAEVKKPGASVKVSCKASGYTFSSYVMHWVRQAPGQGLEWIGYIDPYNDGAKYAQKFQGRVTLTSDKSTSTVYMELSSLRSEDTAVYYCARGGPYGWYFDVWGQGTTVTVSS

SEQ ID NO: 1128 - protein, 5 aa, synthetic construct
  REGION 1..5: note = synthetic
SYVMH

SEQ ID NO: 1129 - protein, 16 aa, synthetic construct
  REGION 1..16: note = synthetic
YIDPYNDGAKYAQKFQ

SEQ ID NO: 1130 - protein, 10 aa, synthetic construct
  REGION 1..10: note = synthetic
GGPYGWYFDV

SEQ ID NO: 1131 - protein, 119 aa, synthetic construct
  REGION 1..119: note = synthetic
EVQLVQSGAEVKKPGSSVKVSCKASGYTFSSYVMHWVRQAPGQGLEWIGYIDPYNDGAKYAQKFQGRVTLTSDKSTSTAYMELSSLRSEDTAVYYCARGGPYGWYFDVWGQGTTVTVSS

SEQ ID NO: 1132 - protein, 5 aa, synthetic construct
  REGION 1..5: note = synthetic
SYVMH

SEQ ID NO: 1133 - protein, 16 aa, synthetic construct
  REGION 1..16: note = synthetic
YIDPYNDGAKYAQKFQ

SEQ ID NO: 1134 - protein, 10 aa, synthetic construct
  REGION 1..10: note = synthetic
GGPYGWYFDV

SEQ ID NO: 1135 - protein, 119 aa, synthetic construct
  REGION 1..119: note = synthetic
EVQLVQSGAEVKKPGASVKVSCKASGYTFSSYVMHWVRQAPGQGLEWIGYIDPYNDGAKYAQKFQGRVTLTSDKSISTAYMELSRLRSDDTVVYYCARGGPYGWYFDVWGQGTTVTVSS

SEQ ID NO: 1136 - protein, 5 aa, synthetic construct
  REGION 1..5: note = synthetic
SYVMH

SEQ ID NO: 1137 - protein, 16 aa, synthetic construct
  REGION 1..16: note = synthetic
YIDPYNDGAKYAQKFQ

SEQ ID NO: 1138 - protein, 10 aa, synthetic construct
  REGION 1..10: note = synthetic
GGPYGWYFDV

SEQ ID NO: 1139 - protein, 107 aa, synthetic construct
  REGION 1..107: note = synthetic
DIQMTQSPSSLSASVGDRVTITCRASEHIYSYLSWYQQKPGKAPKLLIYNAKTLAEGVPSRFSGSGSGTDFTLTISSLQPEDFATYYCQHHFGSPLTFGQGTRLEIK

SEQ ID NO: 1140 - protein, 11 aa, synthetic construct
  REGION 1..11: note = synthetic
RASEHIYSYLS

SEQ ID NO: 1141 - protein, 7 aa, synthetic construct
  REGION 1..7: note = synthetic
NAKTLAE

SEQ ID NO: 1142 - protein, 9 aa, synthetic construct
  REGION 1..9: note = synthetic
QHHFGSPLT

SEQ ID NO: 1143 - protein, 107 aa, synthetic construct
  REGION 1..107: note = synthetic
DIQMTQSPSSLSASVGDRVTITCRASEHIYSYLSWYQQKPGKAPKLLIYNAKTLAEGVPSRFSGSGSGTQFTLTISSLQPEDFATYYCQHHFGSPLTFGQGTRLEIK

SEQ ID NO: 1144 - protein, 11 aa, synthetic construct
  REGION 1..11: note = synthetic
RASEHIYSYLS

SEQ ID NO: 1145 - protein, 7 aa, synthetic construct
  REGION 1..7: note = synthetic
NAKTLAE

SEQ ID NO: 1146 - protein, 9 aa, synthetic construct
  REGION 1..9: note = synthetic
QHHFGSPLT

SEQ ID NO: 1147 - protein, 107 aa, synthetic construct
  REGION 1..107: note = synthetic
DIQMTQSPSSLSASVGDRVTITCRASEHIYSYLSWYQQKPGKVPKLLIYNAKTLAEGVPSRFSGSGSGTDFTLTISSLQPEDVATYYCQHHFGSPLTFGQGTRLEIK

SEQ ID NO: 1148 - protein, 11 aa, synthetic construct
  REGION 1..11: note = synthetic
RASEHIYSYLS

SEQ ID NO: 1149 - protein, 7 aa, synthetic construct
  REGION 1..7: note = synthetic
NAKTLAE

SEQ ID NO: 1150 - protein, 9 aa, synthetic construct
  REGION 1..9: note = synthetic
QHHFGSPLT

SEQ ID NO: 1151 - protein, 107 aa, synthetic construct
  REGION 1..107: note = synthetic
DIQMTQSPSSLSASVGDRVTITCRASEHIYSYLSWYQQKPGKVPKLLIYNAKTLAEGVPSRFSGSGSGTQFTLTISSLQPEDVATYYCQHHFGSPLTFGQGTRLEIK

SEQ ID NO: 1152 - protein, 11 aa, synthetic construct
  REGION 1..11: note = synthetic
RASEHIYSYLS

SEQ ID NO: 1153 - protein, 7 aa, synthetic construct
  REGION 1..7: note = synthetic
NAKTLAE

SEQ ID NO: 1154 - protein, 9 aa, synthetic construct
  REGION 1..9: note = synthetic
QHHFGSPLT

SEQ ID NO: 1155 - protein, 119 aa, synthetic construct; identical to SEQ ID NO: 1135
  REGION 1..119: note = synthetic

SEQ ID NO: 1156 - protein, 17 aa, synthetic construct
  REGION 1..17: note = synthetic
YIDPYNDGAKYAQKFQG

SEQ ID NO: 1157 - protein, 17 aa, synthetic construct
  REGION 1..17: note = synthetic
YIDPYNDGAKYSQKFQG

SEQ ID NO: 1158 - protein, 119 aa, synthetic construct; identical to SEQ ID NO: 1135
  REGION 1..119: note = synthetic

SEQ ID NO: 1159 - protein, 10 aa, synthetic construct
  REGION 1..10: note = synthetic
GGPYGAYFDV

SEQ ID NO: 1160 - protein, 10 aa, synthetic construct
  REGION 1..10: note = synthetic
GGPYGDYFDV

SEQ ID NO: 1161 - protein, 10 aa, synthetic construct
  REGION 1..10: note = synthetic
GGPYGEYFDV

SEQ ID NO: 1162 - protein, 10 aa, synthetic construct
  REGION 1..10: note = synthetic
GGPYGFYFDV

SEQ ID NO: 1163 - protein, 10 aa, synthetic construct
  REGION 1..10: note = synthetic
GGPYGGYFDV

SEQ ID NO: 1164 - protein, 10 aa, synthetic construct
  REGION 1..10: note = synthetic
GGPYGIYFDV

SEQ ID NO: 1165 - protein, 10 aa, synthetic construct
  REGION 1..10: note = synthetic
GGPYGKYFDV

SEQ ID NO: 1166 - protein, 10 aa, synthetic construct
  REGION 1..10: note = synthetic
GGPYGNYFDV

SEQ ID NO: 1167 - protein, 10 aa, synthetic construct
  REGION 1..10: note = synthetic
GGPYGQYFDV

SEQ ID NO: 1168 - protein, 10 aa, synthetic construct
  REGION 1..10: note = synthetic
GGPYGRYFDV

SEQ ID NO: 1169 - protein, 10 aa, synthetic construct
  REGION 1..10: note = synthetic
GGPYGSYFDV

SEQ ID NO: 1170 - protein, 10 aa, synthetic construct
  REGION 1..10: note = synthetic
GGPYGTYFDV

SEQ ID NO: 1171 - protein, 10 aa, synthetic construct
  REGION 1..10: note = synthetic
GGPYGVYFDV

SEQ ID NO: 1172 - protein, 10 aa, synthetic construct
  REGION 1..10: note = synthetic
GGPYGYYFDV

SEQ ID NO: 1173 - protein, 116 aa, synthetic construct
  REGION 1..116: note = synthetic
QVQLMESGPGLVQPSQTLSLTCTVSGFPLTSYTVHWVRQPPGKGLEWIGAIWSSGSTDYNSALKSRLNINRDSSKSQVFLKMNSLQTEDTAIYFCTKSGWAFFDYWGQGVMVTVSS

SEQ ID NO: 1174 - protein, 106 aa, synthetic construct
  REGION 1..106: note = synthetic
DIQMTQSPSLLSASVGDRVTLNCIASQNIYKSLAWYQLKLGEAPKLLIYNANSLQAGIPSRFSGSGSGTDFALTISGLQPEDVATYFCQQYSGGYTFGAGTKLELK

SEQ ID NO: 1175 - protein, 119 aa, synthetic construct
  REGION 1..119: note = synthetic
EVQLVESGGDLVQPGRSLKISCVASGFTFSDYYMAWVRLAPQKGLEWVASISYEGSRTHYGDSVRGRFIISRDNPKNILYLQMNSLGSEDTATYFCARHTGTLDWLVYWGQGTLVIVSS

SEQ ID NO: 1176 - protein, 106 aa, synthetic construct
  REGION 1..106: note = synthetic
NIVMAQSPKSMSISAGDRVTMNCKASQNVDNNIAWYQQKPGQSPKLLIFYASNRYSGVPDRFTGGGYGTDFTLTIKSVQAEDAAFYYCQRIYNFPTFGSGTKLEIK

SEQ ID NO: 1177 - protein, 119 aa, synthetic construct
  REGION 1..119: note = synthetic
EVQLVESGGGLVQPGGSLRLSCAASGFTFSSYIMSWVRQAPGKGLEWVATISGGSKGQYYADSVKGRFTISRDNSKNTLYLQMNSLRAEDTAVYYCAKWLLSYYAMDYWGQGTLVTVSS

SEQ ID NO: 1178 - protein, 8 aa, synthetic construct
  REGION 1..8: note = synthetic
GFTFSSYI

SEQ ID NO: 1179 - protein, 8 aa, synthetic construct
  REGION 1..8: note = synthetic
ISGGSKGQ

SEQ ID NO: 1180 - protein, 12 aa, synthetic construct
  REGION 1..12: note = synthetic
AKWLLSYYAMDY

SEQ ID NO: 1181 - protein, 107 aa, synthetic construct
  REGION 1..107: note = synthetic
DIQMTQSPSSLSASVGDRITITCRASQSMAIWLSWYQQKPGKAPKLLIYKASKSHTGVPSRFSGSGSGTDFTLTISSLQPEDFATYYCQQGQSYPYTFGQGTKLEIK

SEQ ID NO: 1182 - protein, 6 aa, synthetic construct
  REGION 1..6: note = synthetic
QSMAIW

SEQ ID NO: 1183 - skipped

SEQ ID NO: 1184 - protein, 9 aa, synthetic construct
  REGION 1..9: note = synthetic
QQGQSYPYT

SEQ ID NO: 1185 - protein, 330 aa, synthetic construct
  REGION 1..330: note = synthetic
ASTKGPSVFPLAPSSKSTSGGTAALGCLVKDYFPEPVTVSWNSGALTSGVHTFPAVLQSSGLYSLSSVVTVPSSSLGTQTYICNVNHKPSNTKVDKKVEPKSCDKTHTCPPCPAPELLGGPSVFLFPPKPKDTLMISRTPEVTCVVVDVSHEDPEVKFNWYVDGVEVHNAKTKPREEQYNSTYRVVSVLTVLHQDWLNGKEYKCKVSNKALPAPIEKTISKAKGQPREPQVYTLPPSREEMTKNQVSLTCLVKGFYPSDIAVEWESNGQPENNYKTTPPVLDSDGSFFLYSKLTVDKSRWQQGNVFSCSVMHEALHNHYTQKSLSLSPGK

SEQ ID NO: 1186 - protein, 330 aa, synthetic construct
  REGION 1..330: note = synthetic
ASTKGPSVFPLAPSSKSTSGGTAALGCLVKDYFPEPVTVSWNSGALTSGVHTFPAVLQSSGLYSLSSVVTVPSSSLGTQTYICNVNHKPSNTKVDKKVEPKSCDKTHTCPPCPAPELLGGPSVFLFPPKPKDTLMISRTPEVTCVVVAVSHEDPEVKFNWYVDGVEVHNAKTKPREEQYNSTYRVVSVLTVLHQDWLNGKEYKCKVSNKALPAPIEKTISKAKGQPREPQVYTLPPSREEMTKNQVSLTCLVKGFYPSDIAVEWESNGQPENNYKTTPPVLDSDGSFFLYSKLTVDKSRWQQGNVFSCSVMHEALHNHYTQKSLSLSPGK

SEQ ID NO: 1187 - protein, 330 aa, synthetic construct
  REGION 1..330: note = synthetic
ASTKGPSVFPLAPSSKSTSGGTAALGCLVKDYFPEPVTVSWNSGALTSGVHTFPAVLQSSGLYSLSSVVTVPSSSLGTQTYICNVNHKPSNTKVDKKVEPKSCDKTHTCPPCPAPELLGGPSVFLFPPKPKDTLMISRTPEVTCVVVDVSHEDPEVKFNWYVDGVEVHNAKTKPREEQYASTYRVVSVLTVLHQDWLNGKEYKCKVSNKALPAPIEKTISKAKGQPREPQVYTLPPSREEMTKNQVSLTCLVKGFYPSDIAVEWESNGQPENNYKTTPPVLDSDGSFFLYSKLTVDKSRWQQGNVFSCSVMHEALHNHYTQKSLSLSPGK

SEQ ID NO: 1188 - protein, 326 aa, synthetic construct; identical to SEQ ID NO: 50
  REGION 1..326: note = synthetic

SEQ ID NO: 1189 - protein, 377 aa, synthetic construct; identical to SEQ ID NO: 51
  REGION 1..377: note = synthetic

SEQ ID NO: 1190 - protein, 327 aa, synthetic construct
  REGION 1..327: note = synthetic
ASTKGPSVFPLAPCSRSTSESTAALGCLVKDYFPEPVTVSWNSGALTSGVHTFPAVLQSSGLYSLSSVVTVPSSSLGTKTYTCNVDHKPSNTKVDKRVESKYGPPCPSCPAPEFLGGPSVFLFPPKPKDTLMISRTPEVTCVVVDVSQEDPEVQFNWYVDGVEVHNAKTKPREEQFNSTYRVVSVLTVLHQDWLNGKEYKCKVSNKGLPSSIEKTISKAKGQPREPQVYTLPPSQEEMTKNQVSLTCLVKGFYPSDIAVEWESNGQPENNYKTTPPVLDSDGSFFLYSRLTVDKSRWQEGNVFSCSVMHEALHNHYTQKSLSLSPGK

SEQ ID NO: 1191 - protein, 327 aa, synthetic construct; identical to SEQ ID NO: 53
  REGION 1..327: note = synthetic

SEQ ID NO: 1192 - protein, 107 aa, synthetic construct [sequence omitted]

SEQ ID NO: 1193 - protein, 19 aa, synthetic construct
  REGION 1..19: note = synthetic
QVTHEGSTVEKTVAPTECS

SEQ ID NO: 1194 - protein, 120 aa, synthetic construct; identical to SEQ ID NO: 260
  REGION 1..120: note = synthetic

SEQ ID NO: 1195 - protein, 8 aa, synthetic construct
  REGION 1..8: note = synthetic
GYTFTDYN

SEQ ID NO: 1196 - protein, 8 aa, synthetic construct
  REGION 1..8: note = synthetic
IYPYIGGS

SEQ ID NO: 1197 - protein, 13 aa, synthetic construct
  REGION 1..13: note = synthetic
AREDKTARNAMDY

SEQ ID NO: 1198 - protein, 447 aa, synthetic construct
  REGION 1..447: note = synthetic
QVQLVQSGAEVKKPGASVKVSCKASGYTFTDYNINWVRQAPGQGLEWMGYIYPYIGGSGYAQKFQGRVTMTRDTSTSTVYMELSSLRSEDTAVYYCAREDKTARNAMDYWGQGTLVTVSSASTKGPSVFPLAPCSRSTSESTAALGCLVKDYFPEPVTVSWNSGALTSGVHTFPAVLQSSGLYSLSSVVTVPSSSLGTKTYTCNVDHKPSNTKVDKRVESKYGPPCPPCPAPEFLGGPSVFLFPPKPKDTLMISRTPEVTCVVVDVSQEDPEVQFNWYVDGVEVHNAKTKPREEQFNSTYRVVSVLTVLHQDWLNGKEYKCKVSNKGLPSSIEKTISKAKGQPREPQVYTLPPSQEEMTKNQVSLTCLVKGFYPSDIAVEWESNGQPENNYKTTPPVLDSDGSFFLYSRLTVDKSRWQEGNVFSCSVMHEALHNHYTQKSLSLSPGK

SEQ ID NO: 1199 - protein, 107 aa, synthetic construct; identical to SEQ ID NO: 265
  REGION 1..107: note = synthetic

SEQ ID NO: 1200 - protein, 6 aa, synthetic construct
  REGION 1..6: note = synthetic
ENIYSN

SEQ ID NO: 1201 - skipped

SEQ ID NO: 1202 - protein, 9 aa, synthetic construct
  REGION 1..9: note = synthetic
QHFWGTPYT

SEQ ID NO: 1203 - protein, 214 aa, synthetic construct; identical to SEQ ID NO: 269
  REGION 1..214: note = synthetic

SEQ ID NO: 1204 - protein, 119 aa, synthetic construct; identical to SEQ ID NO: 270
  REGION 1..119: note = synthetic

SEQ ID NO: 1205 - protein, 8 aa, synthetic construct
  REGION 1..8: note = synthetic
GYAFTNYL

SEQ ID NO: 1206 - protein, 8 aa, synthetic construct
  REGION 1..8: note = synthetic
INPGSGGI

SEQ ID NO: 1207 - protein, 12 aa, synthetic construct
  REGION 1..12: note = synthetic
ARSETHDTWFAY

SEQ ID NO: 1208 - protein, 446 aa, synthetic construct
  REGION 1..446: note = synthetic
QVQLVQSGAEVKKPGASVKVSCKASGYAFTNYLIEWVRQAPGQGLEWIGVINPGSGGIYYAQKFQGRVTMTADTSTSTVYMELSSLRSEDTAVYYCARSETHDTWFAYWGQGTLVTVSSASTKGPSVFPLAPCSRSTSESTAALGCLVKDYFPEPVTVSWNSGALTSGVHTFPAVLQSSGLYSLSSVVTVPSSSLGTKTYTCNVDHKPSNTKVDKRVESKYGPPCPPCPAPEFLGGPSVFLFPPKPKDTLMISRTPEVTCVVVDVSQEDPEVQFNWYVDGVEVHNAKTKPREEQFNSTYRVVSVLTVLHQDWLNGKEYKCKVSNKGLPSSIEKTISKAKGQPREPQVYTLPPSQEEMTKNQVSLTCLVKGFYPSDIAVEWESNGQPENNYKTTPPVLDSDGSFFLYSRLTVDKSRWQEGNVFSCSVMHEALHNHYTQKSLSLSPGK

SEQ ID NO: 1209 - protein, 107 aa, synthetic construct; identical to SEQ ID NO: 275
  REGION 1..107: note = synthetic

SEQ ID NO: 1210 - protein, 6 aa, synthetic construct
  REGION 1..6: note = synthetic
QSVRIA

SEQ ID NO: 1211 - skipped

SEQ ID NO: 1212 - protein, 9 aa, synthetic construct
  REGION 1..9: note = synthetic
LQHWNYPYT

SEQ ID NO: 1213 - protein, 214 aa, synthetic construct; identical to SEQ ID NO: 279
  REGION 1..214: note = synthetic

SEQ ID NO: 1214 - protein, 8 aa, synthetic construct
  REGION 1..8: note = synthetic
GFTFSNFG

SEQ ID NO: 1215 - protein, 8 aa, synthetic construct
  REGION 1..8: note = synthetic
GFTFSNFG

SEQ ID NO: 1216 - protein, 8 aa, synthetic construct
  REGION 1..8: note = synthetic
ISSGSSTI

SEQ ID NO: 1217 - protein, 14 aa, synthetic construct
  REGION 1..14: note = synthetic
TRLDYYTNSYSMDH

SEQ ID NO: 1218 - protein, 106 aa, synthetic construct
  REGION 1..106: note = synthetic
QIVLTQSPALMSASPGEKVTLTCSASSSLPYIYWYQQKPGSSPKPWIYLTSNLASGVPARFSGSRSGTSYSLTISSVEAEDAATYYCQQWSSNPFTFGSGTKLEIK

SEQ ID NO: 1219 - protein, 5 aa, synthetic construct
  REGION 1..5: note = synthetic
SSLPY

SEQ ID NO: 1220 - skipped

SEQ ID NO: 1221 - protein, 9 aa, synthetic construct
  REGION 1..9: note = synthetic
QQWSSNPFT

SEQ ID NO: 1222 - protein, 117 aa, synthetic construct
  REGION 1..117: note = synthetic
QVQLQQSGAELAKPGASVKMSCKASGYTFTSNWMHWVKQRPGQGLEWIGYINPSNGYTECNQKFRDKATLSADKSSSTAYMQLNSLTSADSAVYYCALMISAWLPYWGQGTLVTVSA

SEQ ID NO: 1223 - protein, 8 aa, synthetic construct
  REGION 1..8: note = synthetic
GYTFTSNW

SEQ ID NO: 1224 - protein, 8 aa, synthetic construct
  REGION 1..8: note = synthetic
INPSNGYT

SEQ ID NO: 1225 - protein, 10 aa, synthetic construct
  REGION 1..10: note = synthetic
ALMISAWLPY

SEQ ID NO: 1226 - protein, 111 aa, synthetic construct
  REGION 1..111: note = synthetic
DIVLTQSPASLAISLGQRATISCRASQSVSASSYSYVHWYQQKPGQPPKLLIKYASSLESGVPARFSGSGSGTDFTLNIHPVEEEDTATYYCLHTWEIPYTFGGGTKLEIK

SEQ ID NO: 1227 - protein, 10 aa, synthetic construct
  REGION 1..10: note = synthetic
QSVSASSYSY

SEQ ID NO: 1228 - skipped

SEQ ID NO: 1229 - protein, 9 aa, synthetic construct
  REGION 1..9: note = synthetic
LHTWEIPYT

SEQ ID NO: 1230 - protein, 116 aa, synthetic construct
  REGION 1..116: note = synthetic
QVQLQQSGAELTRPGASVNLSCKASGYTFTSYWMQWVKQRPGQGLEWIGAIYPGDGDTRFNQKFKGKATLTADESSSTAYMQLSSLASEDSAVYYCATYYRYDDYWGQGTTLTVSS

SEQ ID NO: 1231 - protein, 8 aa, synthetic construct
  REGION 1..8: note = synthetic
GYTFTSYW

SEQ ID NO: 1232 - protein, 8 aa, synthetic construct
  REGION 1..8: note = synthetic
IYPGDGDT

SEQ ID NO: 1233 - protein, 9 aa, synthetic construct
  REGION 1..9: note = synthetic
ATYYRYDDY

SEQ ID NO: 1234 - protein, 106 aa, synthetic construct
  REGION 1..106: note = synthetic
QIVLTQSPAIMSASPGEKVTMTCSASSSVSYMHWYQQKSGTSPKRWIYDTSKLASGVPTRFSGSGSGTSYSLTISSMEAEDAATYYCQQWSSNPYTFGGGTKLEIK

SEQ ID NO: 1235 - protein, 5 aa, synthetic construct
  REGION 1..5: note = synthetic
SSVSY

SEQ ID NO: 1236 - skipped

SEQ ID NO: 1237 - protein, 9 aa, synthetic construct
  REGION 1..9: note = synthetic
QQWSSNPYT

SEQ ID NO: 1238 - protein, 122 aa, synthetic construct
  REGION 1..122: note = synthetic
EVQLQQSGPDLVKPGASMKISCKASGYTFIDYNIHWVKQSQGKSLDWIGYIYPYNGGTGYNQKFKNKATLTVDSSSSTAYMEVRSLTFEDSAVYFCAREADYYGNRGQFDYWGQGTLVTVSA

SEQ ID NO: 1239 - protein, 8 aa, synthetic construct
  REGION 1..8: note = synthetic
GYTFIDYN

SEQ ID NO: 1240 - protein, 8 aa, synthetic construct
  REGION 1..8: note = synthetic
IYPYNGGT

SEQ ID NO: 1241 - protein, 15 aa, synthetic construct
  REGION 1..15: note = synthetic
AREADYYGNRGQFDY

SEQ ID NO: 1242 - protein, 107 aa, synthetic construct
  REGION 1..107: note = synthetic
DIQMTQSPASLSVSVGETVTITCRASENIFSNLAWYQQKQGKSPQLLVYGEANLADGVPSRFSGSGSGTQYSLKINSLQSEDFGNYYCQHFWGTPYTFGGGTTLEIK

SEQ ID NO: 1243 - protein, 6 aa, synthetic construct
  REGION 1..6: note = synthetic
ENIFSN

SEQ ID NO: 1244 - skipped

SEQ ID NO: 1245 - protein, 9 aa, synthetic construct
  REGION 1..9: note = synthetic
QHFWGTPYT

SEQ ID NO: 1246 - protein, 120 aa, synthetic construct
  REGION 1..120: note = synthetic
QVTLKESGPGILQPSQTLSLTCSFSGFSLNTSGTGVGWIRQPSGKGLEWLTHIWWNDNKFYNTFLKSRLTISKETSNNQVFLKIASVDTADAATYYCARMAYGNLWFVNWGQGTLVAVST

SEQ ID NO: 1247 - protein, 10 aa, synthetic construct
  REGION 1..10: note = synthetic
GFSLNTSGTG

SEQ ID NO: 1248 - protein, 7 aa, synthetic construct
  REGION 1..7: note = synthetic
IWWNDNK

SEQ ID NO: 1249 - protein, 12 aa, synthetic construct
  REGION 1..12: note = synthetic
ARMAYGNLWFVN

SEQ ID NO: 1250 - protein, 111 aa, synthetic construct
  REGION 1..111: note = synthetic
DIVLTQSPASLAVSLGQRASISCRASRSVTISGYSYMYWYQQKPGQPPRLLFYLASNLASGVPARFSGSGSGTDFTLNIHPVEEEDAAIYYCQHSRELPYTFGGGTKLEIK

SEQ ID NO: 1251 - protein, 10 aa, synthetic construct
  REGION 1..10: note = synthetic
RSVTISGYSY

SEQ ID NO: 1252 - skipped

SEQ ID NO: 1253 - protein, 9 aa, synthetic construct
  REGION 1..9: note = synthetic
QHSRELPYT

SEQ ID NO: 1254 - protein, 123 aa, synthetic construct
  REGION 1..123: note = synthetic
QIQLVQSGPELKKPRETVKISCKASGYTFTDYSMHWVKQAPGKGLKWMGWINTETGEPTYADDFKGRFAFSLEASASSAYLQINILKDEDTATYFCARSRGGYYEDYYALDYWGQGTSVTVSS

SEQ ID NO: 1255 - protein, 8 aa, synthetic construct
  REGION 1..8: note = synthetic
GYTFTDYS

SEQ ID NO: 1256 - protein, 8 aa, synthetic construct
  REGION 1..8: note = synthetic
INTETGEP

SEQ ID NO: 1257 - protein, 16 aa, synthetic construct
  REGION 1..16: note = synthetic
ARSRGGYYEDYYALDY

SEQ ID NO: 1258 - protein, 107 aa, synthetic construct
  REGION 1..107: note = synthetic
DIQMTQSPASLSASVGESVTITCRASGNIHYYLAWYQQKQGKSPQLLVYNAKNLADGVPSRFSGSGSGTQFSLKINSLQPEDFGSYYCQHFWISPPTFGGGTKLEIK

SEQ ID NO: 1259 - protein, 6 aa, synthetic construct
  REGION 1..6: note = synthetic
GNIHYY

SEQ ID NO: 1260 - skipped

SEQ ID NO: 1261 - protein, 9 aa, synthetic construct
  REGION 1..9: note = synthetic
QHFWISPPT

SEQ ID NO: 1262 - protein, 118 aa, synthetic construct
  REGION 1..118: note = synthetic
EVQLRQSGADLVKPGASVKLSCTASGFNIKDTYIDWVKQRPEQGLDWIGRIDPANGNTKYDPKFQGKATIITDTSSNTAYLQLSNLTSEDTAVYYCARYGSYPYFDYWGRGTTLAVSS

SEQ ID NO: 1263 - protein, 8 aa, synthetic construct
  REGION 1..8: note = synthetic
GFNIKDTY

SEQ ID NO: 1264 - protein, 8 aa, synthetic construct
  REGION 1..8: note = synthetic
IDPANGNT

SEQ ID NO: 1265 - protein, 11 aa, synthetic construct
  REGION 1..11: note = synthetic
ARYGSYPYFDY

SEQ ID NO: 1266 - protein, 107 aa, synthetic construct
  REGION 1..107: note = synthetic
SIVMTQTPKFLLISAGDRVTITCKASQSVRNDVAWYQQKPGQSPKLLMYYASNRYTGVPDRFTGSGYGTDFTFTISTVQAEDLAVYFCQQDYSSPPTFGGGTKLEIK

SEQ ID NO: 1267 - protein, 6 aa, synthetic construct
  REGION 1..6: note = synthetic
QSVRND

SEQ ID NO: 1268 - skipped

SEQ ID NO: 1269 - protein, 9 aa, synthetic construct
  REGION 1..9: note = synthetic
QQDYSSPPT

SEQ ID NO: 1270 - protein, 118 aa, synthetic construct
  REGION 1..118: note = synthetic
QVQLQQSGPELVRPGVSVKISCKVSGYTFTDYVMHWVKQSHAKSLEWIGIISPYSGNTNYNQNFKGKATMTVDKSSSTAYMALARLTSEDSAIYYCAREGDLPMFAYWGQGTLVTVSA

SEQ ID NO: 1271 - protein, 8 aa, synthetic construct
  REGION 1..8: note = synthetic
GYTFTDYV

SEQ ID NO: 1272 - protein, 8 aa, synthetic construct
  REGION 1..8: note = synthetic
ISPYSGNT

SEQ ID NO: 1273 - protein, 11 aa, synthetic construct
  REGION 1..11: note = synthetic
AREGDLPMFAY

SEQ ID NO: 1274 - protein, 106 aa, synthetic construct
  REGION 1..106: note = synthetic
QIVLTQSPTIMSASPGEKVTMTCSASSSVSYIYWYQQNPGSSPRLLIYDTSILASGVPFRFSGSGSGTSYSLTISRMEAEDAATYYCQQWTSYPLTFGSGTKLELK

SEQ ID NO: 1275 - protein, 5 aa, synthetic construct
  REGION 1..5: note = synthetic
SSVSY

SEQ ID NO: 1276 - skipped

SEQ ID NO: 1277 - protein, 9 aa, synthetic construct
  REGION 1..9: note = synthetic
QQWTSYPLT

SEQ ID NO: 1278 - protein, 120 aa, synthetic construct
  REGION 1..120: note = synthetic
EVQLQQSGPELVKPGASVKISCKASGYTFTDYNINWVKQSHGKSLEWIGYIYPYIGGSGYNQKFKSKATLSADNPSSTAYMELRSLTSEDSAVYYCAREDKTARNAMDYWGQGTPVTVSS

SEQ ID NO: 1279 - protein, 8 aa, synthetic construct
  REGION 1..8: note = synthetic
GYTFTDYN

SEQ ID NO: 1280 - protein, 8 aa, synthetic construct
  REGION 1..8: note = synthetic
IYPYIGGS

SEQ ID NO: 1281 - protein, 13 aa, synthetic construct
  REGION 1..13: note = synthetic
AREDKTARNAMDY

SEQ ID NO: 1282 - protein, 107 aa, synthetic construct
  REGION 1..107: note = synthetic
DIQMTQSPASLSVSVGETVTIICRVSENIYSNLAWYQQKQGKSPQLLVYEATNLAEGVPSRFSGSGSGTQYSLKINSLQSEDFGSYYCQHFWGTPYTFGGGTKLEIK

SEQ ID NO: 1283 - protein, 6 aa, synthetic construct
  REGION 1..6: note = synthetic
ENIYSN

SEQ ID NO: 1284 - skipped

SEQ ID NO: 1285 - protein, 9 aa, synthetic construct
  REGION 1..9: note = synthetic
QHFWGTPYT

SEQ ID NO: 1286 - protein, 120 aa, synthetic construct
  REGION 1..120: note = synthetic
DVQLQESGPGLVKPSQSLSLTCTVTGYSITSDYAWNWIRQFPGNKLEWMGYISYSGSTSYNPSLKSRISITRDTSKNQFFLQLNSVTTEDTATYYCARHYRYPPYAMDYWGQGTSVTVSS

SEQ ID NO: 1287 - protein, 9 aa, synthetic construct
  REGION 1..9: note = synthetic
GYSITSDYA

SEQ ID NO: 1288 - protein, 7 aa, synthetic construct
  REGION 1..7: note = synthetic
ISYSGST

SEQ ID NO: 1289 - protein, 13 aa, synthetic construct
  REGION 1..13: note = synthetic
ARHYRYPPYAMDY

SEQ ID NO: 1290 - protein, 113 aa, synthetic construct
  REGION 1..113: note = synthetic
DIVMTQSPSSLAMSVGQKVTMSCKSSQSLLNSSNQKNYLAWYQQKPGQSPKLLVYFASTRESGVPDRFIGSGSGTDFTLTITSVQAEDLADYFCQQHYSTPFTFGSGTKLEIK

SEQ ID NO: 1291 - protein, 12 aa, synthetic construct
  REGION 1..12: note = synthetic
QSLLNSSNQKNY

SEQ ID NO: 1292 - skipped

SEQ ID NO: 1293 - protein, 9 aa, synthetic construct
  REGION 1..9: note = synthetic
QQHYSTPFT

SEQ ID NO: 1294 - protein, 118 aa, synthetic construct
  REGION 1..118: note = synthetic
QVQLKQSGPGLVQPSQSLSITCTVSGFSLTSFGVHWVRQSPGKGLEWLGVIWSGGTTVYDAAFISRLSISKDNSKSQVFFKMNSLQTNDTAIYYCARKRGNFYVMDYWGQGTSVTVSS

SEQ ID NO: 1295 - protein, 8 aa, synthetic construct
  REGION 1..8: note = synthetic
GFSLTSFG

SEQ ID NO: 1296 - protein, 7 aa, synthetic construct
  REGION 1..7: note = synthetic
IWSGGTT

SEQ ID NO: 1297 - protein, 12 aa, synthetic construct
  REGION 1..12: note = synthetic
ARKRGNFYVMDY

SEQ ID NO: 1298 - protein, 113 aa, synthetic construct; identical to SEQ ID NO: 1290
  REGION 1..113: note = synthetic

SEQ ID NO: 1299 - protein, 12 aa, synthetic construct
  REGION 1..12: note = synthetic
QSLLNSSNQKNY

SEQ ID NO: 1300 - skipped

SEQ ID NO: 1301 - protein, 9 aa, synthetic construct
  REGION 1..9: note = synthetic
QQHYSTPFT

SEQ ID NO: 1302 - protein, 118 aa, synthetic construct
  REGION 1..118: note = synthetic
QVQLQQPGSELVRPGTSVKLSCKASGYTFTSYWVHWVRQRHGQGLEWIGNVYPGSGSTNYDEKFKSKGTLTVDTSSSTAYMHLSSLTSEDSAVYYCTRGVLRFPLDYWGQGTTLTVSS

SEQ ID NO: 1303 - protein, 8 aa, synthetic construct
  REGION 1..8: note = synthetic
GYTFTSYW

SEQ ID NO: 1304 - protein, 8 aa, synthetic construct
  REGION 1..8: note = synthetic
VYPGSGST

SEQ ID NO: 1305 - protein, 11 aa, synthetic construct
  REGION 1..11: note = synthetic
TRGVLRFPLDY

SEQ ID NO: 1306 - protein, 112 aa, synthetic construct
  REGION 1..112: note = sythetic
DIVMTQAAPSVPVTPGESVSISCRSSKSLLHSNGNTYLYWFLQRPGQSPHLLIYRMSNLASGVPDRFSGSGSGTAFTLRISRVEAEDVGVYYCMQHLEYPLTFGAGTKLELK

SEQ ID NO: 1307 - protein, 11 aa, synthetic construct
  REGION 1..11: note = synthetic
KSLLHSNGNTY

SEQ ID NO: 1308 - skipped

SEQ ID NO: 1309 - protein, 9 aa, synthetic construct
  REGION 1..9: note = synthetic
MQHLEYPLT

SEQ ID NO: 1310 - protein, 118 aa, synthetic construct
  REGION 1..118: note = synthetic
QVQLQQSGPEVVRPGVSVKISCKGSGYKFPDYVMHWVKQSHAKSLEWIGIISIYSGNTNYNQKFKGKATMTVDKSSSTAYMELARLTSEDSAIYYCAREGDLPMFAYWGQGTLVTVSA

SEQ ID NO: 1311 - protein, 8 aa, synthetic construct
  REGION 1..8: note = synthetic
GYKFPDYV

SEQ ID NO: 1312 - protein, 8 aa, synthetic construct
  REGION 1..8: note = synthetic
ISIYSGNT

SEQ ID NO: 1313 - protein, 11 aa, synthetic construct
  REGION 1..11: note = synthetic
AREGDLPMFAY

SEQ ID NO: 1314 - protein, 106 aa, synthetic construct
  REGION 1..106: note = synthetic
QIVLTQSPAIMSASPGEKVTMTCNASSSVSYMYWYQQKPISSPRLLIYDTSNLASGVPVRFSGSGSGTSYSLTIGRMEAEDAATYYCQQWSSYPLTFGAGTKVEVK

SEQ ID NO: 1315 - protein, 5 aa, synthetic construct
  REGION 1..5: note = synthetic
SSVSY

SEQ ID NO: 1316 - skipped

SEQ ID NO: 1317 - protein, 9 aa, synthetic construct
  REGION 1..9: note = synthetic
QQWSSYPLT

SEQ ID NO: 1318 - protein, 122 aa, synthetic construct
  REGION 1..122: note = synthetic
QVQLKESGPGLVAPSQSLSITCTVSGFSLTAYNINWVRQPPGKGLEWLGMIWGDGNTDYNSPLKSRLTISKDNSKSQVFLKMDSLQTDDTARYYCARDLKVRRDSPYTMDYWGQGTSVTVSS

SEQ ID NO: 1319 - protein, 8 aa, synthetic construct
  REGION 1..8: note = synthetic
GFSLTAYN

SEQ ID NO: 1320 - protein, 7 aa, synthetic construct
  REGION 1..7: note = synthetic
IWGDGNT

SEQ ID NO: 1321 - protein, 16 aa, synthetic construct
  REGION 1..16: note = synthetic
ARDLKVRRDSPYTMDY

SEQ ID NO: 1322 - protein, 112 aa, synthetic construct
  REGION 1..112: note = synthetic
NIMMTQSPSSLAVSAGEKVTMSCKSSQSVLYSSNQKNYLAWYQQKPGQSPKLLIYWASNRESGVPDRFTGSGSGTDFTLTISSVQAEDLAVYYCHQYLSSYTFGGGTKLEIK

SEQ ID NO: 1323 - protein, 12 aa, synthetic construct
  REGION 1..12: note = synthetic
QSVLYSSNQKNY

SEQ ID NO: 1324 - skipped

SEQ ID NO: 1325 - protein, 8 aa, synthetic construct
  REGION 1..8: note = synthetic
HQYLSSYT

SEQ ID NO: 1326 - protein, 124 aa, synthetic construct
  REGION 1..124: note = synthetic
DVQLQESGPGLVKPSQSLSLTCTVTGYSLTSDYAWNWIRQFPGNKLEWMGYITYSGGTTYNPSLKSRISITRDTSKNQFFLQLTSVTTEDTATYYCARRGSGTTVVGDWYFDVWGAGTTVTVSS

SEQ ID NO: 1327 - protein, 9 aa, synthetic construct
  REGION 1..9: note = synthetic
GYSLTSDYA

SEQ ID NO: 1328 - protein, 7 aa, synthetic construct
  REGION 1..7: note = synthetic
ITYSGGT

SEQ ID NO: 1329 - protein, 17 aa, synthetic construct
  REGION 1..17: note = synthetic
ARRGSGTTVVGDWYFDV

SEQ ID NO: 1330 - protein, 113 aa, synthetic construct
  REGION 1..113: note = synthetic
DIVMSQSPSSLAVSVGEKVTMSCKSSQSLLYSFNQKYYLAWYQQKPGQSPKLLIYWASTRESGVPDRFTGSGSGTDFTPTISSVTAEDLAVYYCQQFYTYPYTFGGGTKLEMK

SEQ ID NO: 1331 - protein, 12 aa, synthetic construct
  REGION 1..12: note = synthetic
QSLLYSFNQKYY

SEQ ID NO: 1332 - skipped

SEQ ID NO: 1333 - protein, 9 aa, synthetic construct
  REGION 1..9: note = synthetic
QQFYTYPYT

SEQ ID NO: 1334 - protein, 122 aa, synthetic construct
  REGION 1..122: note = synthetic
EVQVQQSGPELVKPGASVKISCKASGYTFTKSNMHWVKQSHGKSLEWIGYIYPYNGGTGYNQNFKSKATLTVDISSSTAYMELRSLTLEDSAVYLCAREADYYGNRGQFDYWGQGTLVTVSA

SEQ ID NO: 1335 - protein, 8 aa, synthetic construct
  REGION 1..8: note = synthetic
GYTFTKSN

SEQ ID NO: 1336 - protein, 8 aa, synthetic construct
  REGION 1..8: note = synthetic
IYPYNGGT

SEQ ID NO: 1337 - protein, 15 aa, synthetic construct
  REGION 1..15: note = synthetic
AREADYYGNRGQFDY

SEQ ID NO: 1338 - protein, 107 aa, synthetic construct
  REGION 1..107: note = synthetic
DIQMTQSPASLSVSVGETVTITCRASDNIFSNLAWYHQKQGKSPHLLVYGATNLADGVPSRFSGSGSGTQYSLKINSLQSEDFGDYYCQHFWGTPYTFGGGTKLEIK

SEQ ID NO: 1339 - protein, 6 aa, synthetic construct
  REGION 1..6: note = synthetic
DNIFSN

SEQ ID NO: 1340 - skipped

SEQ ID NO: 1341 - protein, 9 aa, synthetic construct
  REGION 1..9: note = synthetic
QHFWGTPYT

SEQ ID NO: 1342 - protein, 119 aa, synthetic construct
  REGION 1..119: note = synthetic
QVQLQQSGAELMRPGTSVKVSCKASGYAFTNHLIEWIKQRPGQGLEWIGVINPGSDSTDYNEKFKDKATLTADKSSSTAYMQLSSLTSDDSAVYFCARSLYYNSWFVYWGQGTLVTVSA

SEQ ID NO: 1343 - protein, 8 aa, synthetic construct
  REGION 1..8: note = synthetic
GYAFTNHL

SEQ ID NO: 1344 - protein, 8 aa, synthetic construct
  REGION 1..8: note = synthetic
INPGSDST

SEQ ID NO: 1345 - protein, 12 aa, synthetic construct
  REGION 1..12: note = synthetic
ARSLYYNSWFVY

SEQ ID NO: 1346 - protein, 107 aa, synthetic construct
  REGION 1..107: note = synthetic
DIQMTQSPASLSASVGETVTITCRASENIYSYLAWYQQKRGKSPQLLVYNAKTLVEGVPSRFSGSGSGTQFSLKINSLQPEDFGSYYCQHHYGTPYTFGGGTKLEIK

SEQ ID NO: 1347 - protein, 6 aa, synthetic construct
  REGION 1..6: note = synthetic
ENIYSY

SEQ ID NO: 1348 - skipped

SEQ ID NO: 1349 - protein, 9 aa, synthetic construct
  REGION 1..9: note = synthetic
QHHYGTPYT

SEQ ID NO: 1350 - protein, 118 aa, synthetic construct
  REGION 1..118: note = synthetic
EVQLQQSGAELVKPGASVRLSCTASGFSIRDTYIHWVKQRPEQGLDWIGKIDPANGKSEYDPKFQGRATMTTDTSSNTAYLQLSSLTSEDTAVYYCTRYGYYPYFDVWGAGTTVTVFS

SEQ ID NO: 1351 - protein, 8 aa, synthetic construct
  REGION 1..8: note = synthetic
GFSIRDTY

SEQ ID NO: 1352 - protein, 8 aa, synthetic construct
  REGION 1..8: note = synthetic
IDPANGKS

SEQ ID NO: 1353 - protein, 11 aa, synthetic construct
  REGION 1..11: note = synthetic
TRYGYYPYFDV

SEQ ID NO: 1354 - protein, 107 aa, synthetic construct
  REGION 1..107: note = synthetic
SIVMTQTPKFLLVSAGDRVAITCKASQSVRHDVVWYQQKPGQSPKLLIYYASSRYTGVPDRFTGSGYGTDFTFTISTVQAEDLALYFCLQDFSSPWTFGGGTKLEIK

SEQ ID NO: 1355 - protein, 6 aa, synthetic construct
  REGION 1..6: note = synthetic
QSVRHD

SEQ ID NO: 1356 - skipped

SEQ ID NO: 1357 - protein, 9 aa, synthetic construct
  REGION 1..9: note = synthetic
LQDFSSPWT

SEQ ID NO: 1358 - protein, 120 aa, synthetic construct
  REGION 1..120: note = synthetic
EVQLQQSGPELVKPGASVKISCKTSGYTFTKNTMHWVRQSHGKSLEWIGGINPNSGGASFNQKFMGKATLTVDKSSSTAYMELRSLTSEDSAVYYCARDGYDGDWFFDVWGAGTTVTVSS

SEQ ID NO: 1359 - protein, 8 aa, synthetic construct
  REGION 1..8: note = synthetic
GYTFTKNT

SEQ ID NO: 1360 - protein, 8 aa, synthetic construct
  REGION 1..8: note = synthetic
INPNSGGA

SEQ ID NO: 1361 - protein, 13 aa, synthetic construct
  REGION 1..13: note = synthetic
ARDGYDGDWFFDV

SEQ ID NO: 1362 - protein, 107 aa, synthetic construct
  REGION 1..107: note = synthetic
DIQMNQSPFSLSASLGDTVTITCHASQNIYVWLSWYQQKPGNIPKLLIYKASDLHTGVPSRFSGSGSGTDFTLNISSLQPEDIATYYCQQGQSYPRTFGGGTKLEIK

SEQ ID NO: 1363 - protein, 6 aa, synthetic construct
  REGION 1..6: note = synthetic
QNIYVW

SEQ ID NO: 1364 - skipped

SEQ ID NO: 1365 - protein, 9 aa, synthetic construct
  REGION 1..9: note = synthetic
QQGQSYPRT

SEQ ID NO: 1366 - protein, 114 aa, synthetic construct
  REGION 1..114: note = synthetic
QVQLKESGPGLVAPSQSLSITCTVSGFSLIGHGVNWIRQPPGKGLEWLGVIWGDGNTDYNSALKSRLSISKDNSKSQVFLKMNSLQTDDTARYFCAVNSAMDYWGQGTAVTVSS

SEQ ID NO: 1367 - protein, 8 aa, synthetic construct
  REGION 1..8: note = synthetic
GFSLIGHG

SEQ ID NO: 1368 - protein, 7 aa, synthetic construct
  REGION 1..7: note = synthetic
IWGDGNT

SEQ ID NO: 1369 - protein, 8 aa, synthetic construct
  REGION 1..8: note = synthetic
AVNSAMDY

SEQ ID NO: 1370 - protein, 107 aa, synthetic construct
  REGION 1..107: note = synthetic
NIVMTQSPKSMSMSVGERVTLNCTASENVASFVSWYQQKPEQSPKLLIYGTSNRYTGVPDRFTGSGSATDFTLTISSVQAEDLGDYHCGQSYNYPFTFGSGTKLEIE

SEQ ID NO: 1371 - protein, 6 aa, synthetic construct
  REGION 1..6: note = synthetic
ENVASF

SEQ ID NO: 1372 - skipped

SEQ ID NO: 1373 - protein, 9 aa, synthetic construct
  REGION 1..9: note = synthetic
GQSYNYPFT

SEQ ID NO: 1374 - protein, 119 aa, synthetic construct
  REGION 1..119: note = synthetic
QVQLQQSGAELVRPGASVKVSCKTSGYAFTNYLIEWVKQRPGQGLEWIGVINPGSGGIYYNDKFKVKTTLTADKSSSTAYMQLSSLTSDDSAVYFCARSETHDTWFAYWGQGTLVTVSA

SEQ ID NO: 1375 - protein, 8 aa, synthetic construct
  REGION 1..8: note = synthetic
GYAFTNYL

SEQ ID NO: 1376 - protein, 8 aa, synthetic construct
  REGION 1..8: note = synthetic
INPGSGGI

SEQ ID NO: 1377 - protein, 12 aa, synthetic construct
  REGION 1..12: note = synthetic
ARSETHDTWFAY

SEQ ID NO: 1378 - protein, 108 aa, synthetic construct
  REGION 1..108: note = synthetic
DIVMTQSQKFISTSVGDRVSITCKASQSVRIAVAWFQQKPGQSPKALIYLASTRHTGVPDRFTGSGSGTDFTLTISNVQSEDLADYFCLQHWNYPYTFGGGTKLEIKR

SEQ ID NO: 1379 - protein, 6 aa, synthetic construct
  REGION 1..6: note = synthetic
QSVRIA

SEQ ID NO: 1380-1381 - skipped (2 entries)

SEQ ID NO: 1382 - protein, 120 aa, synthetic construct
  REGION 1..120: note = synthetic
QVQLQQSGAELVRPGTSVKMSCKAAGYTFTNYWIGWVKQRPGHGLEWIGDIYPGGGYTNYNEKFKGKATLTADTSSSTAYMQLSSLTSEDSAIYYCASPYYGSSYGFAFWGQGTLVTVSA

SEQ ID NO: 1383 - protein, 8 aa, synthetic construct
  REGION 1..8: note = synthetc
GYTFTNYW

SEQ ID NO: 1384 - protein, 8 aa, synthetic construct
  REGION 1..8: note = synthetic
IYPGGGYT

SEQ ID NO: 1385 - protein, 13 aa, synthetic construct
  REGION 1..13: note = synthetic
ASPYYGSSYGFAF

SEQ ID NO: 1386 - protein, 108 aa, synthetic construct; identical to SEQ ID NO: 1378
  REGION 1..108: note = synthetic

SEQ ID NO: 1387 - protein, 6 aa, synthetic construct
  REGION 1..6: note = synthetic
QSVRIA

SEQ ID NO: 1388 - skipped

SEQ ID NO: 1389 - protein, 9 aa, synthetic construct
  REGION 1..9: note = synthetic
LQHWNYPYT

SEQ ID NO: 1390 - protein, 117 aa, synthetic construct
  REGION 1..117: note = synthetic
QVQLKESGPGLVAPSQSLSITCTVSGFSLSGYGIKWVRQPPGKGLEWLGTIWGDGSTDYNSALKSRLSISKDNSKSQVFLKMTSLQTDDTARYYCASDSLGITFGYWGQGTLVTVSA

SEQ ID NO: 1391 - protein, 8 aa, synthetic construct
  REGION 1..8: note = synthetic
GFSLSGYG

SEQ ID NO: 1392 - protein, 7 aa, synthetic construct
  REGION 1..7: note = synthetic
IWGDGST

SEQ ID NO: 1393 - protein, 11 aa, synthetic construct
  REGION 1..11: note = synthetic
ASDSLGITFGY

SEQ ID NO: 1394 - protein, 107 aa, synthetic construct
  REGION 1..107: note = synthetic
DIQMTQTTSSLSASLGDRVTISCRASQDISNYLNWYQQKPDGTVKLLIYYTSRLHSGVPSRFSGSGSGTDYSLTISNLEQEDIATYFCQQGNTLPLTFGAGTKLELK

SEQ ID NO: 1395 - protein, 6 aa, synthetic construct
  REGION 1..6: note = synthetic
QDISNY

SEQ ID NO: 1396 - skipped

SEQ ID NO: 1397 - protein, 9 aa, synthetic construct
  REGION 1..9: note = synthetic
QQGNTLPLT

SEQ ID NO: 1398 - protein, 120 aa, synthetic construct
  REGION 1..120: note = synthetic
QVQLKESGPGLVAPSQSLSITCTVSGFSLTSYAITWVRQPPGKGLEWLGVIWPGGGTNYNSALKSRLSISKDNSKSHLFLKMNSLQTDDTARYYCVRSYDGYLDWYFDVWGTGTTVTVSS

SEQ ID NO: 1399 - protein, 8 aa, synthetic construct
  REGION 1..8: note = synthetic
GFSLTSYA

SEQ ID NO: 1400 - protein, 7 aa, synthetic construct
  REGION 1..7: note = synthetic
IWPGGGT

SEQ ID NO: 1401 - protein, 14 aa, synthetic construct
  REGION 1..14: note = synthetic
VRSYDGYLDWYFDV

SEQ ID NO: 1402 - protein, 107 aa, synthetic construct
  REGION 1..107: note = synthetic
NIVMTQSPKSMSMSVGERVTLSCKASENVGTYVSWYQQKPDQSPKLLIYGASNRYTGVPDRFTGSGSATDFTLIISSVQAEDLSDYHCGQSYSYPYTFGGGTKLEII

SEQ ID NO: 1403 - protein, 6 aa, synthetic construct
  REGION 1..6: note = synthetic
ENVGTY

SEQ ID NO: 1404 - skipped

SEQ ID NO: 1405 - protein, 9 aa, synthetic construct
  REGION 1..9: note = synthetic
GQSYSYPYT

SEQ ID NO: 1406 - protein, 123 aa, synthetic construct
  REGION 1..123: note = synthetic
QIQLVQSGPDLKKPGETVKISCKASGYTFTTYGMSWVKQAPGRGLKWMGWINTYSGVSTFPDDFKGRFAFSLETSASTAYLQINNLKNEDSATYFCARLGMGSTTGAGYFDVWGTGTTVTVSS

SEQ ID NO: 1407 - protein, 8 aa, synthetic construct
  REGION 1..8: note = synthetic
GYTFTTYG

SEQ ID NO: 1408 - protein, 8 aa, synthetic construct
  REGION 1..8: note = synthetic
INTYSGVS

SEQ ID NO: 1409 - protein, 16 aa, synthetic construct
  REGION 1..16: note = synthetic
ARLGMGSTTGAGYFDV

SEQ ID NO: 1410 - protein, 108 aa, synthetic construct
  REGION 1..108: note = synthetic
DIVLTQSPAIMSASPGEKVTMTCSASSSVSSWYLHWYQQKSGASPKLWIYGTSNLASGVPARFSGSGSGTSYSLTISSVEAEDAATYYCQQYRSDPYTFGSGTKLEIK

SEQ ID NO: 1411 - protein, 7 aa, synthetic construct
  REGION 1..7: note = synthetic
SSVSSWY

SEQ ID NO: 1412 - skipped

SEQ ID NO: 1413 - protein, 9 aa, synthetic construct
  REGION 1..9: note = synthetic
QQYRSDPYT

SEQ ID NO: 1414 - protein, 123 aa, synthetic construct
  REGION 1..123: note = synthetic
QIQLVQSGPELKKPGETVKISCKASGYTFTTYGMSWVKQAPGKGLKWMGWINTYSGVSTYADDFEGRFAFSLETSVSTAYLQINNLKNEDTATYFCARLGRGSTTGAGYLDVWGTGTTVTVSS

SEQ ID NO: 1415 - protein, 8 aa, synthetic construct
  REGION 1..8: note = synthetic
GYTFTTYG

SEQ ID NO: 1416 - protein, 8 aa, synthetic construct
  REGION 1..8: note = synthetic
INTYSGVS

SEQ ID NO: 1417 - protein, 16 aa, synthetic construct
  REGION 1..16: note = synthetic
ARLGRGSTTGAGYLDV

SEQ ID NO: 1418 - protein, 108 aa, synthetic construct
  REGION 1..108: note = synthetic
DIVLTQSPAIMSASPGEKVSMTCSASSSVSSWYLHWYQQKSGASPKLWIYGTSNLASGVPARFSGSGSGTSYSLTISSVEAEDAATYYCQQYHSDPYTFGSGTKLEIK

SEQ ID NO: 1419 - protein, 7 aa, synthetic construct
  REGION 1..7: note = synthetic
SSVSSWY

SEQ ID NO: 1420 - skipped

SEQ ID NO: 1421 - protein, 9 aa, synthetic construct
  REGION 1..9: note = synthetic
QQYHSDPYT

SEQ ID NO: 1422 - protein, 123 aa, synthetic construct; identical to SEQ ID NO: 1406
  REGION 1..123: note = synthetic

SEQ ID NO: 1423 - protein, 8 aa, synthetic construct
  REGION 1..8: note = synthetic
GYTFTTYG

SEQ ID NO: 1424 - protein, 8 aa, synthetic construct
  REGION 1..8: note = synthetic
INTYSGVS

SEQ ID NO: 1425 - protein, 16 aa, synthetic construct
  REGION 1..16: note = synthetic
ARLGMGSTTGAGYFDV

SEQ ID NO: 1426 - protein, 106 aa, synthetic construct
  REGION 1..106: note = synthetic
ENVLTQSPAIMSASLGEKVTLSCRASSSVNYMYWYQQKSDASPKLWIYYTSNLAPGVPARFSGSGSGNSYSLTISSVEGEDAATYYCQQFTSSPWTFGGGTKLEIK

SEQ ID NO: 1427 - protein, 5 aa, synthetic construct
  REGION 1..5: note = synthetic
SSVNY

SEQ ID NO: 1428 - skipped

SEQ ID NO: 1429 - protein, 9 aa, synthetic construct
  REGION 1..9: note = synthetic
QQFTSSPWT

SEQ ID NO: 1430 - protein, 114 aa, synthetic construct
  REGION 1..114: note = synthetic
EVQLQQSGPELVKPGASVKISCKASGYTFTDYSMNWVKQSHGKSLEWIGDITPNNGSPNYNQKFKDKATLTVDKSSSTVYMELRSLTSEDSAVYYCASLFFDYWGHGTTLTVSS

SEQ ID NO: 1431 - protein, 8 aa, synthetic construct
  REGION 1..8: note = synthetic
GYTFTDYS

SEQ ID NO: 1432 - protein, 8 aa, synthetic construct
  REGION 1..8: note = synthetic
ITPNNGSP

SEQ ID NO: 1433 - protein, 7 aa, synthetic construct
  REGION 1..7: note = synthetic
ASLFFDY

SEQ ID NO: 1434 - protein, 113 aa, synthetic construct
  REGION 1..113: note = synthetic
DIVMTQSPSSLSVSAGEKVTMSCKSSQSLLNSGNQKNYLAWYQQKPGQPPKLLIYGASTRDSGVPDRFTGSGSGTDFTLTITSVQAEDLAVYYCQNDHTYPYTFGGGTKLEIK

SEQ ID NO: 1435 - protein, 12 aa, synthetic construct
  REGION 1..12: note = synthetic
QSLLNSGNQKNY

SEQ ID NO: 1436 - skipped

SEQ ID NO: 1437 - protein, 9 aa, synthetic construct
  REGION 1..9: note = synthetic
QNDHTYPYT

SEQ ID NO: 1438 - protein, 120 aa, synthetic construct
  REGION 1..120: note = synthetic
QVQLQQPGTELVKPGASVKLSCKASGFTFTTHWMHWVRQRPGQGLEWIGNIYPSNGGSNYNEKFKTKATLTVDRSSSTAYMHLSSLTSEDSAVYYCARRVNWDGYYFDYWGQGTTLTVSS

SEQ ID NO: 1439 - protein, 8 aa, synthetic construct
  REGION 1..8: note = synthetic
GFTFTTHW

SEQ ID NO: 1440 - protein, 8 aa, synthetic construct
  REGION 1..8: note = synthetic
IYPSNGGS

SEQ ID NO: 1441 - protein, 13 aa, synthetic construct
  REGION 1..13: note = synthetic
ARRVNWDGYYFDY

SEQ ID NO: 1442 - protein, 107 aa, synthetic construct
  REGION 1..107: note = synthetic
DIVMTQSQKFMSTSVGDRVSVTCKASQNVGTNVAWYQQKPGQSPKLLIYSASYRYSGVPDRFTGSGSGTDFTLTISNVQSEDLADYFCQQYNSYPLTFGGGTKLEIK

SEQ ID NO: 1443 - protein, 6 aa, synthetic construct
  REGION 1..6: note = synthetic
QNVGTN

SEQ ID NO: 1444 - skipped

SEQ ID NO: 1445 - protein, 9 aa, synthetic construct
  REGION 1..9: note = synthetic
QQYNSYPLT

SEQ ID NO: 1446 - protein, 118 aa, synthetic construct
  REGION 1..118: note = synthetic
QVQLQESGTELVKPGASVKLSCKASGYTFTSYWIHWVKQRPGQGLEWIGNINPSNGGTNYNEKFKSKAALTVDKSSSTAYMQLSSLTSEDSAVYYCARRGLPYFFDYWGQGTTLTVSS

SEQ ID NO: 1447 - protein, 8 aa, synthetic construct
  REGION 1..8: note = synthetic
GYTFTSYW

SEQ ID NO: 1448 - protein, 8 aa, synthetic construct
  REGION 1..8: note = synthetic
INPSNGGT

SEQ ID NO: 1449 - protein, 11 aa, synthetic construct
  REGION 1..11: note = synthetic
ARRGLPYFFDY

SEQ ID NO: 1450 - protein, 107 aa, synthetic construct
  REGION 1..107: note = synthetic
DIVMTQSQKFMSTSVGDRVSVTCKGSQNVGYNVAWYQQKPGQSPKALVYSASDRHSGVPDRFAGSGSGTDFTLTISNVQSEDLAEYFCQQYNSYPLTFGAGTKLELK

SEQ ID NO: 1451 - protein, 6 aa, synthetic construct
  REGION 1..6: note = synthetic
QNVGYN

SEQ ID NO: 1452 - skipped

SEQ ID NO: 1453 - protein, 9 aa, synthetic construct
  REGION 1..9: note = synthetic
QQYNSYPLT

SEQ ID NO: 1454 - protein, 120 aa, synthetic construct; identical to SEQ ID NO: 260
  REGION 1..120: note = synthetic

SEQ ID NO: 1455 - protein, 8 aa, synthetic construct
  REGION 1..8: note = synthetic
GYTFTDYN

SEQ ID NO: 1456 - protein, 8 aa, synthetic construct
  REGION 1..8: note = synthetic
IYPYIGGS

SEQ ID NO: 1457 - protein, 13 aa, synthetic construct
  REGION 1..13: note = synthetic
AREDKTARNAMDY

SEQ ID NO: 1458 - protein, 107 aa, synthetic construct
  REGION 1..107: note = synthetic
DIQMTQSPSSLSASVGDRVTITCRVSENIYDVLAWYQQKPGKAPKLLIYEATNLAEGVPSRFSGSGSGTDFTLTISSLQPEDFATYYCQHFWGTPYTFGQGTKLEIK

SEQ ID NO: 1459 - protein, 6 aa, synthetic construct
  REGION 1..6: note = synthetic
ENIYDV

SEQ ID NO: 1460 - skipped

SEQ ID NO: 1461 - protein, 9 aa, synthetic construct
  REGION 1..9: note = synthetic
QHFWGTPYT

SEQ ID NO: 1462 - protein, 120 aa, synthetic construct
  REGION 1..120: note = synthetic
EVQLQQSGAELVRSGASVKMSCKVNDYTFTNYNMHWLRQTPGQGLEWIGYIYPGNGDTNYNQKFKGKATLTADTSSSTAYMQIISLTSEDPAVYFCARQGIHYYYIDVWGAGTTVTVSSG

SEQ ID NO: 1463 - protein, 10 aa, synthetic construct
  REGION 1..10: note = synthetic
DYTFTNYNMH

SEQ ID NO: 1464 - protein, 13 aa, synthetic construct
  REGION 1..13: note = synthetic
YIYPGNGDTNYNQ

SEQ ID NO: 1465 - protein, 10 aa, synthetic construct
  REGION 1..10: note = synthetic
QGIHYYYIDV

SEQ ID NO: 1466 - protein, 110 aa, synthetic construct
  REGION 1..110: note = synthetic
DIEMTQSPATLSVTPGDRVSLSCRASQSIRDYLHWYQQKSHESPRLLIKYVSQSISGIPSRFSGSGSGSEFTLSINSVEPEDVGVYYCQNGHSLPLTFGSGTKLEIKRTV

SEQ ID NO: 1467 - protein, 11 aa, synthetic construct
  REGION 1..11: note = synthetic
RASQSIRDYLH

SEQ ID NO: 1468 - protein, 7 aa, synthetic construct
  REGION 1..7: note = synthetic
YVSQSIS

SEQ ID NO: 1469 - protein, 9 aa, synthetic construct
  REGION 1..9: note = synthetic
QNGHSLPLT

SEQ ID NO: 1470 - protein, 118 aa, synthetic construct
  REGION 1..118: note = synthetic
QVQLQQSGAELAKPGASVKMSCKASGYTFTSDWMHWVKQRPGQGLEWIGYINPSTGYTEYNQKFKDKATLTADKSSSTAYMQLRSLTSEDSAVYYCARGSSGSWFAYWGQGTLVTVSA

SEQ ID NO: 1471 - protein, 5 aa, synthetic construct
  REGION 1..5: note = synthetic
SDWMH

SEQ ID NO: 1472 - protein, 17 aa, synthetic construct
  REGION 1..17: note = synthetic
YINPSTGYTEYNQKFKD

SEQ ID NO: 1473 - protein, 9 aa, synthetic construct
  REGION 1..9: note = synthetic
GSSGSWFAY

SEQ ID NO: 1474 - protein, 111 aa, synthetic construct
  REGION 1..111: note = synthetic
DIVLTQSPASLAVSLGQRATISCRASQSVSTSSYSYMHWYQQKPGQPPKLLIKYASNLESGVPARFSGSGSGTDFTLNIHPVEEEDTATYYCQHSWEIPYTFGGGTKLEIK

SEQ ID NO: 1475 - protein, 15 aa, synthetic construct
  REGION 1..15: note = synthetic
RASQSVSTSSYSYMH

SEQ ID NO: 1476 - protein, 7 aa, synthetic construct
  REGION 1..7: note = synthetic
YASNLES

SEQ ID NO: 1477 - protein, 9 aa, synthetic construct
  REGION 1..9: note = synthetic
QHSWEIPYT

SEQ ID NO: 1478 - protein, 118 aa, synthetic construct; identical to SEQ ID NO: 1470
  REGION 1..118: note = synthetic

SEQ ID NO: 1479 - protein, 5 aa, synthetic construct
  REGION 1..5: note = SYNTHETIC
SDWMH

SEQ ID NO: 1480 - protein, 17 aa, synthetic construct
  REGION 1..17: note = synthetic
YINPSTGYTEYNQKFKD

SEQ ID NO: 1481 - protein, 9 aa, synthetic construct
  REGION 1..9: note = synthetic
GSSGSWFAY

SEQ ID NO: 1482 - protein, 112 aa, synthetic construct
  REGION 1..112: note = synthetic
DVVMTQTPLTLSVTIGQPASISCKSSQSLLNSDGKTYLNWLLQRPGQSPKRLIYLVSKLDSGVPDRFTGSGSGTDFTLKISRVEAEDLGVYYCWQGTHFPRTFGGGTKLEIK

SEQ ID NO: 1483 - protein, 16 aa, synthetic construct
  REGION 1..16: note = synthetic
KSSQSLLNSDGKTYLN

SEQ ID NO: 1484 - protein, 7 aa, synthetic construct
  REGION 1..7: note = synthetic
LVSKLDS

SEQ ID NO: 1485 - protein, 9 aa, synthetic construct
  REGION 1..9: note = synthetic
WQGTHFPRT

SEQ ID NO: 1486 - protein, 114 aa, synthetic construct
  REGION 1..114: note = synthetic
EVQLQQSVAELVRPGTSVTISCKASGYTFTNYWLGWVKQRPGHGLEWIGDIFPGGDYPNYNEKFKGKATLTADTSSSTAYMQLSSLTSEDSSVYFCTRGYFDVWGAGTTVTVSS

SEQ ID NO: 1487 - protein, 6 aa, synthetic construct
  REGION 1..6: note = synthetic
TNYWLG

SEQ ID NO: 1488 - protein, 17 aa, synthetic construct
  REGION 1..17: note = synthetic
DIFPGGDYPNYNEKFKG

SEQ ID NO: 1489 - protein, 7 aa, synthetic construct
  REGION 1..7: note = synthetic
TRGYFDV

SEQ ID NO: 1490 - protein, 114 aa, synthetic construct
  REGION 1..114: note = synthetic
DIQMTQSPSSLSVSAGEKVTMSCKSSQSLLNSENQKNYLAWFQQKPGQPPKMLIYGASTRESGVPDRFTGSGSGTDFTLTISSVQAEDLAVYYCQNDHSYPFTFGSGTKLEIKR

SEQ ID NO: 1491 - protein, 17 aa, synthetic construct
  REGION 1..17: note = synthetic
KSSQSLLNSENQKNYLA

SEQ ID NO: 1492 - protein, 7 aa, synthetic construct
  REGION 1..7: note = synthetic
GASTRES

SEQ ID NO: 1493 - protein, 7 aa, synthetic construct
  REGION 1..7: note = synthetic
QNDHSYP

SEQ ID NO: 1494 - protein, 120 aa, synthetic construct; identical to SEQ ID NO: 1462
  REGION 1..120: note = synthetic

SEQ ID NO: 1495 - protein, 10 aa, synthetic construct
  REGION 1..10: note = synthetic
DYTFTNYNMH

SEQ ID NO: 1496 - protein, 13 aa, synthetic construct
  REGION 1..13: note = synthetic
YIYPGNGDTNYNQ

SEQ ID NO: 1497 - protein, 10 aa, synthetic construct
  REGION 1..10: note = synthetic
QGIHYYYIDV

SEQ ID NO: 1498 - protein, 110 aa, synthetic construct; identical to SEQ ID NO: 1466
  REGION 1..110: note = synthetic

SEQ ID NO: 1499 - protein, 11 aa, synthetic construct
  REGION 1..11: note = synthetic
RASQSIRDYLH

SEQ ID NO: 1500 - protein, 7 aa, synthetic construct
  REGION 1..7: note = synthetic
YVSQSIS

SEQ ID NO: 1501 - protein, 9 aa, synthetic construct
  REGION 1..9: note = synthetic
QNGHSLPLT

SEQ ID NO: 1502 - protein, 118 aa, synthetic construct; identical to SEQ ID NO: 1470
  REGION 1..118: note = synthetic

SEQ ID NO: 1503 - protein, 5 aa, synthetic construct
  REGION 1..5: note = synthetic
SDWMH

SEQ ID NO: 1504 - protein, 17 aa, synthetic construct
  REGION 1..17: note = synthetic
YINPSTGYTEYNQKFKD

SEQ ID NO: 1505 - protein, 9 aa, synthetic construct
  REGION 1..9: note = synthetic
GSSGSWFAY

SEQ ID NO: 1506 - protein, 111 aa, synthetic construct; identical to SEQ ID NO: 1474
  REGION 1..111: note = synthetic

SEQ ID NO: 1507 - protein, 15 aa, synthetic construct
  REGION 1..15: note = synthetic
RASQSVSTSSYSYMH

SEQ ID NO: 1508 - protein, 7 aa, synthetic construct
  REGION 1..7: note = synthetic
YASNLES

SEQ ID NO: 1509 - protein, 9 aa, synthetic construct
  REGION 1..9: note = synthetic
QHSWEIPYT

SEQ ID NO: 1510 - protein, 118 aa, synthetic construct; identical to SEQ ID NO: 1470
  REGION 1..118: note = synthetic

SEQ ID NO: 1511 - protein, 5 aa, synthetic construct
  REGION 1..5: note = synthetic
SDWMH

SEQ ID NO: 1512 - protein, 17 aa, synthetic construct
  REGION 1..17: note = synthetic
YINPSTGYTEYNQKFKD

SEQ ID NO: 1513 - protein, 9 aa, synthetic construct
  REGION 1..9: note = synthetic
GSSGSWFAY

SEQ ID NO: 1514 - protein, 112 aa, synthetic construct; identical to SEQ ID NO: 1482
  REGION 1..112: note = synthetic

SEQ ID NO: 1515 - protein, 16 aa, synthetic construct
  REGION 1..16: note = synthetic
KSSQSLLNSDGKTYLN

SEQ ID NO: 1516 - protein, 7 aa, synthetic construct
  REGION 1..7: note = synthetic
LVSKLDS

SEQ ID NO: 1517 - protein, 9 aa, synthetic construct
  REGION 1..9: note = synthetic
WQGTHFPRT

SEQ ID NO: 1518 - protein, 114 aa, synthetic construct; identical to SEQ ID NO: 1486
  REGION 1..114: note = synthetic

SEQ ID NO: 1519 - protein, 6 aa, synthetic construct
  REGION 1..6: note = synthetic
TNYWLG

SEQ ID NO: 1520 - protein, 17 aa, synthetic construct
  REGION 1..17: note = synthetic
DIFPGGDYPNYNEKFKG

SEQ ID NO: 1521 - protein, 7 aa, synthetic construct
  REGION 1..7: note = synthetic
TRGYFDV

SEQ ID NO: 1522 - protein, 114 aa, synthetic construct; identical to SEQ ID NO: 1490
  REGION 1..114: note = synthetic

SEQ ID NO: 1523 - protein, 17 aa, synthetic construct
  REGION 1..17: note = synthetic
KSSQSLLNSENQKNYLA

SEQ ID NO: 1524 - protein, 7 aa, synthetic construct
  REGION 1..7: note = synthetic
GASTRES

SEQ ID NO: 1525 - protein, 7 aa, synthetic construct
  REGION 1..7: note = synthetic
QNDHSYP

SEQ ID NO: 1526 - protein, 8 aa, synthetic construct
  REGION 1..8: note = synthetic
GGTFSSYA

SEQ ID NO: 1527 - protein, 8 aa, synthetic construct
  REGION 1..8: note = synthetic
GGTFSSSA

SEQ ID NO: 1528 - protein, 8 aa, synthetic construct
  REGION 1..8: note = synthetic
GFSLSHFS

SEQ ID NO: 1529 - protein, 8 aa, synthetic construct
  REGION 1..8: note = synthetic
GYTLTELS

SEQ ID NO: 1530 - protein, 8 aa, synthetic construct
  REGION 1..8: note = synthetic
GGTFSSSA

SEQ ID NO: 1531 - protein, 8 aa, synthetic construct
  REGION 1..8: note = synthetic
GGTFGTYA

SEQ ID NO: 1532 - protein, 10 aa, synthetic construct
  REGION 1..10: note = synthetic
GGSISSSSYY

SEQ ID NO: 1533 - protein, 9 aa, synthetic construct
  REGION 1..9: note = synthetic
SGSISSTNW

SEQ ID NO: 1534 - protein, 8 aa, synthetic construct
  REGION 1..8: note = synthetic
GYTLTELS

SEQ ID NO: 1535 - protein, 8 aa, synthetic construct
  REGION 1..8: note = synthetic
GFTFSSYA

SEQ ID NO: 1536 - protein, 8 aa, synthetic construct
  REGION 1..8: note = synthetic
GYTLTELS

SEQ ID NO: 1537 - protein, 8 aa, synthetic construct
  REGION 1..8: note = synthetic
GFTFSSYA

SEQ ID NO: 1538 - protein, 8 aa, synthetic construct
  REGION 1..8: note = synthetic
GYTLTELS

SEQ ID NO: 1539 - protein, 8 aa, synthetic construct
  REGION 1..8: note = synthetic
GYTLTELS

SEQ ID NO: 1540 - protein, 8 aa, synthetic construct
  REGION 1..8: note = synthetic
GFTFSSYG

SEQ ID NO: 1541 - protein, 8 aa, synthetic construct
  REGION 1..8: note = synthetic
IIPIFGTA

SEQ ID NO: 1542 - protein, 8 aa, synthetic construct
  REGION 1..8: note = synthetic
IIPIYGIT

SEQ ID NO: 1543 - protein, 8 aa, synthetic construct
  REGION 1..8: note = synthetic
FDPEEGGT

SEQ ID NO: 1544 - protein, 8 aa, synthetic construct
  REGION 1..8: note = synthetic
FDPEDGET

SEQ ID NO: 1545 - protein, 8 aa, synthetic construct
  REGION 1..8: note = synthetic
IIPIYGIT

SEQ ID NO: 1546 - protein, 8 aa, synthetic construct
  REGION 1..8: note = synthetic
ITPISATI

SEQ ID NO: 1547 - protein, 7 aa, synthetic construct
  REGION 1..7: note = synthetic
IYYSGST

SEQ ID NO: 1548 - protein, 7 aa, synthetic construct
  REGION 1..7: note = synthetic
IYHSGST

SEQ ID NO: 1549 - protein, 8 aa, synthetic construct
  REGION 1..8: note = synthetic
FDPEDGET

SEQ ID NO: 1550 - protein, 8 aa, synthetic construct
  REGION 1..8: note = synthetic
ISYDGSNK

SEQ ID NO: 1551 - protein, 8 aa, synthetic construct
  REGION 1..8: note = synthtetic
FDPEDGET

SEQ ID NO: 1552 - protein, 8 aa, synthetic construct
  REGION 1..8: note = synthetic
ISYDGSNK

SEQ ID NO: 1553 - protein, 8 aa, synthetic construct
  REGION 1..8: note = synthetic
FDPEDGET

SEQ ID NO: 1554 - protein, 8 aa, synthetic construct
  REGION 1..8: note = synthetic
FDPEDGET

SEQ ID NO: 1555 - protein, 8 aa, synthetic construct
  REGION 1..8: note = synthetic
IRYDGSNK

SEQ ID NO: 1556 - protein, 13 aa, synthetic construct
  REGION 1..13: note = synthetic
AREEVSSPYGMDV

SEQ ID NO: 1557 - protein, 22 aa, synthetic construct
  REGION 1..22: note = synthetic
ARDDTARRVRGVPYYYYYAMDV

SEQ ID NO: 1558 - protein, 14 aa, synthetic construct
  REGION 1..14: note = synthetic
ATGIWYSSGWPVDY

SEQ ID NO: 1559 - protein, 18 aa, synthetic construct
  REGION 1..18: note = synthetic
ATVSRVRGVINYYYYMDV

SEQ ID NO: 1560 - protein, 22 aa, synthetic construct
  REGION 1..22: note = synthetic
ARDDTARRVRGVPYYYYYAMDV

SEQ ID NO: 1561 - protein, 13 aa, synthetic construct
  REGION 1..13: note = synthetic
ARGFEYSDGLLDD

SEQ ID NO: 1562 - protein, 15 aa, synthetic construct
  REGION 1..15: note = synthetic
ARGAWELRLGDWFDP

SEQ ID NO: 1563 - protein, 10 aa, synthetic construct
  REGION 1..10: note = synthetic
ARVGPAAIYY

SEQ ID NO: 1564 - protein, 21 aa, synthetic construct
  REGION 1..21: note = synthetic
ATAKPGIAVAGQNYYYYYMDV

SEQ ID NO: 1565 - protein, 17 aa, synthetic construct
  REGION 1..17: note = synthetic
ASSPIGYSYGYWGGMDV

SEQ ID NO: 1566 - protein, 17 aa, synthetic construct
  REGION 1..17: note = synthetic
ATGPAAAGVGYYYYMDV

SEQ ID NO: 1567 - protein, 20 aa, synthetic construct
  REGION 1..20: note = synthetic
ARDVMVYCSSTSCYFYGMDV

SEQ ID NO: 1568 - protein, 18 aa, synthetic construct
  REGION 1..18: note = synthetic
ATGGYSSGFNYYYYYMDV

SEQ ID NO: 1569 - protein, 14 aa, synthetic construct
  REGION 1..14: note = synthetic
ATGVTTYYYYGMDV

SEQ ID NO: 1570 - protein, 14 aa, synthetic construct
  REGION 1..14: note = synthetic
ARDLFDFWWDGMDV

SEQ ID NO: 1571 - protein, 9 aa, synthetic construct
  REGION 1..9: note = synthetic
TGAVTSGHY

SEQ ID NO: 1572 - protein, 6 aa, synthetic construct
  REGION 1..6: note = synthetic
QGIGNY

SEQ ID NO: 1573 - protein, 11 aa, synthetic construct
  REGION 1..11: note = synthetic
QSLLDSSGYNY

SEQ ID NO: 1574 - protein, 11 aa, synthetic construct
  REGION 1..11: note = synthetic
QSLLYRNGNNY

SEQ ID NO: 1575 - protein, 6 aa, synthetic construct
  REGION 1..6: note = synthetic
QSVDSS

SEQ ID NO: 1576 - protein, 12 aa, synthetic construct
  REGION 1..12: note = synthetic
QSLFYSDDGNTY

SEQ ID NO: 1577 - protein, 9 aa, synthetic construct
  REGION 1..9: note = synthetic
SSNIGAGYD

SEQ ID NO: 1578 - protein, 8 aa, synthetic construct
  REGION 1..8: note = synthetic
SNNVGYEG

SEQ ID NO: 1579 - protein, 11 aa, synthetic construct
  REGION 1..11: note = synthetic
QSLLYRNGNNY

SEQ ID NO: 1580 - protein, 9 aa, synthetic construct
  REGION 1..9: note = synthetic
SGIDVRTNK

SEQ ID NO: 1581 - protein, 11 aa, synthetic construct
  REGION 1..11: note = synthetic
QSLLYRNGYNY

SEQ ID NO: 1582 - protein, 6 aa, synthetic construct
  REGION 1..6: note = synthetic
QDIRDY

SEQ ID NO: 1583 - protein, 11 aa, synthetic construct
  REGION 1..11: note = synthetic
QSLLYRNGNNY

SEQ ID NO: 1584 - protein, 11 aa, synthetic construct
  REGION 1..11: note = synthetic
QSLLYSNGNNF

SEQ ID NO: 1585 - protein, 7 aa, synthetic construct
  REGION 1..7: note = synthetic
QSVSSMY

SEQ ID NO: 1586-1594 - skipped (9 entries)

SEQ ID NO: 1595 - protein, 7 aa, synthetic construct
  REGION 1..7: note = synthetic
FQSDSDK

SEQ ID NO: 1596-1600 - skipped (5 entries)

SEQ ID NO: 1601 - protein, 10 aa, synthetic construct
  REGION 1..10: note = synthetic
LLSYSGASWV

SEQ ID NO: 1602 - protein, 9 aa, synthetic construct
  REGION 1..9: note = synthetic
QQLKDYPIT

SEQ ID NO: 1603 - protein, 9 aa, synthetic construct
  REGION 1..9: note = synthetic
MQALQTPIT

SEQ ID NO: 1604 - protein, 9 aa, synthetic construct
  REGION 1..9: note = synthetic
MQALQTPPT

SEQ ID NO: 1605 - protein, 9 aa, synthetic construct
  REGION 1..9: note = synthetic
QQYKDWPFT

SEQ ID NO: 1606 - protein, 9 aa, synthetic construct
  REGION 1..9: note = synthetic
MQHMEFPLT

SEQ ID NO: 1607 - protein, 12 aa, synthetic construct
  REGION 1..12: note = synthetic
QSYDSSLSIYVV

SEQ ID NO: 1608 - protein, 11 aa, synthetic construct
  REGION 1..11: note = synthetic
SAWDSSLNAVV

SEQ ID NO: 1609 - protein, 9 aa, synthetic construct
  REGION 1..9: note = synthetic
MQALQTPPT

SEQ ID NO: 1610 - protein, 9 aa, synthetic construct
  REGION 1..9: note = synthetic
LIWHTSGWV

SEQ ID NO: 1611 - protein, 9 aa, synthetic construct
  REGION 1..9: note = synthetic
MQALQTPPT

SEQ ID NO: 1612 - protein, 9 aa, synthetic construct
  REGION 1..9: note = synthetic
QQFENLPIT

SEQ ID NO: 1613 - protein, 9 aa, synthetic construct
  REGION 1..9: note = synthetic
MQALQTPPT

SEQ ID NO: 1614 - protein, 9 aa, synthetic construct
  REGION 1..9: note = synthetic
MQALQTPPT

SEQ ID NO: 1615 - protein, 10 aa, synthetic construct
  REGION 1..10: note = synthetic
QQYVSSPMYT

SEQ ID NO: 1616 - protein, 8 aa, synthetic construct
  REGION 1..8: note = synthetic
GGTFSSSA

SEQ ID NO: 1617 - protein, 8 aa, synthetic construct
  REGION 1..8: note = synthetic
GGTFNNYG

SEQ ID NO: 1618 - protein, 8 aa, synthetic construct
  REGION 1..8: note = synthetic
GYTLTELS

SEQ ID NO: 1619 - protein, 10 aa, synthetic construct
  REGION 1..10: note = synthetic
GGSISNSNYY

SEQ ID NO: 1620 - protein, 8 aa, synthetic construct
  REGION 1..8: note = synthetic
GGTFSSSA

SEQ ID NO: 1621 - protein, 8 aa, synthetic construct
  REGION 1..8: note = synthetic
GFTFGTSS

SEQ ID NO: 1622 - protein, 8 aa, synthetic construct
  REGION 1..8: note = synthetic
GYTLTELS

SEQ ID NO: 1623 - protein, 8 aa, synthetic construct
  REGION 1..8: note = synthetic
GYTLTELS

SEQ ID NO: 1624 - protein, 8 aa, synthetic construct
  REGION 1..8: note = synthetic
GGTFSSYA

SEQ ID NO: 1625 - protein, 10 aa, synthetic construct
  REGION 1..10: note = synthetic
GFSLTSGGMS

SEQ ID NO: 1626 - protein, 8 aa, synthetic construct
  REGION 1..8: note = synthetic
GYTFTAYY

SEQ ID NO: 1627 - protein, 8 aa, synthetic construct
  REGION 1..8: note = synthetic
GYTFTNYY

SEQ ID NO: 1628 - protein, 10 aa, synthetic construct
  REGION 1..10: note = synthetic
GGSISSSSYY

SEQ ID NO: 1629 - protein, 8 aa, synthetic construct
  REGION 1..8: note = synthetic
GFTFDDYA

SEQ ID NO: 1630 - protein, 8 aa, synthetic construct
  REGION 1..8: note = synthetic
RFTFEDYA

SEQ ID NO: 1631 - protein, 8 aa, synthetic construct
  REGION 1..8: note = synthetic
IIPIYGIT

SEQ ID NO: 1632 - protein, 8 aa, synthetic construct
  REGION 1..8: note = synthetic
IIPLFGTT

SEQ ID NO: 1633 - protein, 8 aa, synthetic construct
  REGION 1..8: note = synthetic
FDPEDGET

SEQ ID NO: 1634 - protein, 7 aa, synthetic construct
  REGION 1..7: note = synthetic
IYYSGST

SEQ ID NO: 1635 - protein, 8 aa, synthetic construct
  REGION 1..8: note = synthetic
IIPIYGIT

SEQ ID NO: 1636 - protein, 8 aa, synthetic construct
  REGION 1..8: note = synthetic
ISFDGTEI

SEQ ID NO: 1637 - protein, 8 aa, synthetic construct
  REGION 1..8: note = synthetic
FDPEDGET

SEQ ID NO: 1638 - protein, 8 aa, synthetic construct
  REGION 1..8: note = synthetic
FDPEDGET

SEQ ID NO: 1639 - protein, 8 aa, synthetic construct
  REGION 1..8: note = synthetic
IIPIFGTA

SEQ ID NO: 1640 - protein, 7 aa, synthetic construct
  REGION 1..7: note = synthetic
IDWNDDK

SEQ ID NO: 1641 - protein, 8 aa, synthetic construct
  REGION 1..8: note = synthetic
INPNSGGT

SEQ ID NO: 1642 - protein, 8 aa, synthetic construct
  REGION 1..8: note = synthetic
INPSGGIT

SEQ ID NO: 1643 - protein, 7 aa, synthetic construct
  REGION 1..7: note = synthetic
IYYSGST

SEQ ID NO: 1644 - protein, 8 aa, synthetic construct
  REGION 1..8: note = synthetic
ISWNSGSI

SEQ ID NO: 1645 - protein, 8 aa, synthetic construct
  REGION 1..8: note = synthetic
ISWKSGGI

SEQ ID NO: 1646 - protein, 22 aa, synthetic construct
  REGION 1..22: note = synthetic
ARDDTARRVRGVPYYYYYAMDV

SEQ ID NO: 1647 - protein, 15 aa, synthetic construct
  REGION 1..15: note = synthetic
ARDRMAADGMAVFDY

SEQ ID NO: 1648 - protein, 19 aa, synthetic construct
  REGION 1..19: note = synthetic
ATEVPMVRGARRYYYYMDV

SEQ ID NO: 1649 - protein, 15 aa, synthetic construct
  REGION 1..15: note = synthetic
ARGAWELSLGDWFDP

SEQ ID NO: 1650 - protein, 22 aa, synthetic construct
  REGION 1..22: note = synthetic
ARDDTARRVRGVPYYYYYAMDV

SEQ ID NO: 1651 - protein, 15 aa, synthetic construct
  REGION 1..15: note = synthetic
AKGSGNIYFYSGMDV

SEQ ID NO: 1652 - protein, 19 aa, synthetic construct
  REGION 1..19: note = synthetic
ATGVPAAIGVYYYYYYMDV

SEQ ID NO: 1653 - protein, 20 aa, synthetic construct
  REGION 1..20: note = synthetic
ATDSRDGPAARGGYYYYMDV

SEQ ID NO: 1654 - protein, 20 aa, synthetic construct
  REGION 1..20: note = synthetic
ARDAYYYDSSGYYNPDAFDI

SEQ ID NO: 1655 - protein, 12 aa, synthetic construct
  REGION 1..12: note = synthetic
ARIRGMTWGFDS

SEQ ID NO: 1656 - protein, 21 aa, synthetic construct
  REGION 1..21: note = synthetic
ARDGAFYYGSENYYNAGWFDP

SEQ ID NO: 1657 - protein, 18 aa, synthetic construct
  REGION 1..18: note = synthetic
ARAGLGYNWNYAPSGMDV

SEQ ID NO: 1658 - protein, 15 aa, synthetic construct
  REGION 1..15: note = synthetic
ARGAWELRLGDWFDP

SEQ ID NO: 1659 - protein, 15 aa, synthetic construct
  REGION 1..15: note = synthetic
AKDVNRILVAGMVDY

SEQ ID NO: 1660 - protein, 15 aa, synthetic construct
  REGION 1..15: note = synthetic
VKDPTLVATDRAFNI

SEQ ID NO: 1661 - protein, 6 aa, synthetic construct
  REGION 1..6: note = synthetic
QSVSSY

SEQ ID NO: 1662 - protein, 8 aa, synthetic construct
  REGION 1..8: note = synthetic
SSNIGRHF

SEQ ID NO: 1663 - protein, 11 aa, synthetic construct
  REGION 1..11: note = synthetic
QTLLYINENNY

SEQ ID NO: 1664 - protein, 9 aa, synthetic construct
  REGION 1..9: note = synthetic
SSNIGAGYD

SEQ ID NO: 1665 - protein, 6 aa, synthetic construct
  REGION 1..6: note = synthetic
QNVYGE

SEQ ID NO: 1666 - protein, 6 aa, synthetic construct
  REGION 1..6: note = synthetic
QSISGW

SEQ ID NO: 1667 - protein, 11 aa, synthetic construct
  REGION 1..11: note = synthetic
QSLLYSNGYNY

SEQ ID NO: 1668 - protein, 11 aa, synthetic construct
  REGION 1..11: note = synthetic
QSLLYINGYNY

SEQ ID NO: 1669 - protein, 11 aa, synthetic construct
  REGION 1..11: note = synthetic
QSLLHSNGYNY

SEQ ID NO: 1670 - protein, 7 aa, synthetic construct
  REGION 1..7: note = synthetic
QSVSSSY

SEQ ID NO: 1671 - protein, 11 aa, synthetic construct
  REGION 1..11: note = synthetic
QSLLSGNGYNY

SEQ ID NO: 1672 - protein, 9 aa, synthetic construct
  REGION 1..9: note = synthetic
SSDVGGYNY

SEQ ID NO: 1673 - protein, 9 aa, synthetic construct
  REGION 1..9: note = synthetic
SSNIGAGYD

SEQ ID NO: 1674 - protein, 11 aa, synthetic construct
  REGION 1..11: note = synthetic
QSLLHSNGYNY

SEQ ID NO: 1675 - protein, 11 aa, synthetic construct
  REGION 1..11: note = synthetic
QSLLHSNGYNY

SEQ ID NO: 1676-1690 - skipped (15 entries)

SEQ ID NO: 1691 - protein, 9 aa, synthetic construct
  REGION 1..9: note = synthetic
QQYDDWPQT

SEQ ID NO: 1692 - protein, 11 aa, synthetic construct
  REGION 1..11: note = synthetic
SSWDAALNGVV

SEQ ID NO: 1693 - protein, 9 aa, synthetic construct
  REGION 1..9: note = synthetic
MQGLQTPPT

SEQ ID NO: 1694 - protein, 12 aa, synthetic construct
  REGION 1..12: note = synthetic
QSYDSSLSVYVV

SEQ ID NO: 1695 - protein, 9 aa, synthetic construct
  REGION 1..9: note = synthetic
QQRRDWPIT

SEQ ID NO: 1696 - protein, 9 aa, synthetic construct
  REGION 1..9: note = synthetic
QQYYSYPLT

SEQ ID NO: 1697 - protein, 9 aa, synthetic construct
  REGION 1..9: note = synthetic
MQALQSPVT

SEQ ID NO: 1698 - protein, 9 aa, synthetic construct
  REGION 1..9: note = synthetic
MQALQTPPT

SEQ ID NO: 1699 - protein, 9 aa, synthetic construct
  REGION 1..9: note = synthetic
MQGLQTPRT

SEQ ID NO: 1700 - protein, 9 aa, synthetic construct
  REGION 1..9: note = synthetic
QQYGTTPFA

SEQ ID NO: 1701 - protein, 9 aa, synthetic construct
  REGION 1..9: note = synthetic
MQALKSPLT

SEQ ID NO: 1702 - protein, 10 aa, synthetic construct
  REGION 1..10: note = synthetic
SSYAGSNNLV

SEQ ID NO: 1703 - protein, 12 aa, synthetic construct
  REGION 1..12: note = synthetic
QSYDSSLSVYVV

SEQ ID NO: 1704 - protein, 9 aa, synthetic construct
  REGION 1..9: note = synthetic
MQGLQTPIT

SEQ ID NO: 1705 - protein, 9 aa, synthetic construct
  REGION 1..9: note = synthetic
MQYLQTPDT

SEQ ID NO: 1706 - protein, 8 aa, synthetic construct
  REGION 1..8: note = synthetic
GGTFSSSA

SEQ ID NO: 1707 - protein, 8 aa, synthetic construct
  REGION 1..8: note = synthetic
GFTFSSYG

SEQ ID NO: 1708 - protein, 8 aa, synthetic construct
  REGION 1..8: note = synthetic
GGTFSSSA

SEQ ID NO: 1709 - protein, 8 aa, synthetic construct
  REGION 1..8: note = synthetic
GYTLTELS

SEQ ID NO: 1710 - protein, 8 aa, synthetic construct
  REGION 1..8: note = synthetic
GYMFTNYP

SEQ ID NO: 1711 - protein, 8 aa, synthetic construct
  REGION 1..8: note = synthetic
GGTFSSSA

SEQ ID NO: 1712 - protein, 8 aa, synthetic construct
  REGION 1..8: note = synthetic
TYTFTTYY

SEQ ID NO: 1713 - protein, 8 aa, synthetic construct
  REGION 1..8: note = synthetic
GGTFSSSA

SEQ ID NO: 1714 - protein, 8 aa, synthetic construct
  REGION 1..8: note = synthetic
GFNFRGYA

SEQ ID NO: 1715 - protein, 8 aa, synthetic construct
  REGION 1..8: note = synthetic
GYTLTELS

SEQ ID NO: 1716 - protein, 8 aa, synthetic construct
  REGION 1..8: note = synthetic
GGTFSSSA

SEQ ID NO: 1717 - protein, 8 aa, synthetic construct
  REGION 1..8: note = synthetic
GGTFSSSA

SEQ ID NO: 1718 - protein, 8 aa, synthetic construct
  REGION 1..8: note = synthetic
GGTFSSYA

SEQ ID NO: 1719 - protein, 8 aa, synthetic construct
  REGION 1..8: note = synthetic
GGTFSSSA

SEQ ID NO: 1720 - protein, 8 aa, synthetic construct
  REGION 1..8: note = synthetic
GYTLTELS

SEQ ID NO: 1721 - protein, 8 aa, synthetic construct
  REGION 1..8: note = synthetic
GGTFSSSA

SEQ ID NO: 1722 - protein, 8 aa, synthetic construct
  REGION 1..8: note = synthetic
IIPIYGIT

SEQ ID NO: 1723 - protein, 8 aa, synthetic construct
  REGION 1..8: note = synthetic
ISYDGSNK

SEQ ID NO: 1724 - protein, 8 aa, synthetic construct
  REGION 1..8: note = synthetic
IIPIYGIT

SEQ ID NO: 1725 - protein, 8 aa, synthetic construct
  REGION 1..8: note = synthetic
FDPEDGET

SEQ ID NO: 1726 - protein, 8 aa, synthetic construct
  REGION 1..8: note = synthetic
INAGTGNT

SEQ ID NO: 1727 - protein, 8 aa, synthetic construct
  REGION 1..8: note = synthetic
IIPIYGIT

SEQ ID NO: 1728 - protein, 8 aa, synthetic construct
  REGION 1..8: note = synthetic
IYPSGGNT

SEQ ID NO: 1729 - protein, 8 aa, synthetic construct
  REGION 1..8: note = synthetic
IIPIYGIT

SEQ ID NO: 1730 - protein, 8 aa, synthetic construct
  REGION 1..8: note = synthetic
ISGSGGTT

SEQ ID NO: 1731 - protein, 8 aa, synthetic construct
  REGION 1..8: note = synthetic
FDPEDGET

SEQ ID NO: 1732 - protein, 8 aa, synthetic construct
  REGION 1..8: note = synthetic
IIPIYGIT

SEQ ID NO: 1733 - protein, 8 aa, synthetic construct
  REGION 1..8: note = synthetic
IIPIYGIT

SEQ ID NO: 1734 - protein, 8 aa, synthetic construct
  REGION 1..8: note = synthetic
IIPIFGTA

SEQ ID NO: 1735 - protein, 8 aa, synthetic construct
  REGION 1..8: note = synthetic
IIPIYGIT

SEQ ID NO: 1736 - protein, 8 aa, synthetic construct
  REGION 1..8: note = synthetic
FDPEDGET

SEQ ID NO: 1737 - protein, 8 aa, synthetic construct
  REGION 1..8: note = synthetic
IIPIYGIT

SEQ ID NO: 1738 - protein, 22 aa, synthetic construct
  REGION 1..22: note = synthetic
ARDDTARRVRGVPYYYYYAMDV

SEQ ID NO: 1739 - protein, 18 aa, synthetic construct
  REGION 1..18: note = synthetic
AKEDRLRFLEWLFYGMDV

SEQ ID NO: 1740 - protein, 22 aa, synthetic construct
  REGION 1..22: note = synthetic
ARDDTARRVRGVPYYYYYAMDV

SEQ ID NO: 1741 - protein, 19 aa, synthetic construct
  REGION 1..19: note = synthetic
ATEDPGPVAGPYYYYGMDV

SEQ ID NO: 1742 - protein, 21 aa, synthetic construct
  REGION 1..21: note = synthetic
AREGMFYYGLESYYKGGWFDP

SEQ ID NO: 1743 - protein, 22 aa, synthetic construct
  REGION 1..22: note = synthetic
ARDDTARRVRGVPYYYYYAMDV

SEQ ID NO: 1744 - protein, 13 aa, synthetic construct
  REGION 1..13: note = synthetic
VRDQNYYYSAMDV

SEQ ID NO: 1745 - protein, 22 aa, synthetic construct
  REGION 1..22: note = synthetic
ARDDTARRVRGVPYYYYYAMDV

SEQ ID NO: 1746 - protein, 15 aa, synthetic construct
  REGION 1..15: note = synthetic
AQSYAQIGYGGHIDH

SEQ ID NO: 1747 - protein, 19 aa, synthetic construct
  REGION 1..19: note = synthetic
ATGVPAAIGVYYYYYYMDV

SEQ ID NO: 1748 - protein, 22 aa, synthetic construct
  REGION 1..22: note = synthetic
ARDDTARRVRGVPYYYYYAMDV

SEQ ID NO: 1749 - protein, 22 aa, synthetic construct
  REGION 1..22: note = synthetic
ARDDTARRVRGVPYYYYYAMDV

SEQ ID NO: 1750 - protein, 20 aa, synthetic construct
  REGION 1..20: note = synthetic
ARDAYYYDSSGYYNPDAFDI

SEQ ID NO: 1751 - protein, 22 aa, synthetic construct
  REGION 1..22: note = synthetic
ARDDTARRVRGVPYYYYYAMDV

SEQ ID NO: 1752 - protein, 22 aa, synthetic construct
  REGION 1..22: note = synthetic
ATEVGYCSGGSCYISYYYGMDV

SEQ ID NO: 1753 - protein, 22 aa, synthetic construct
  REGION 1..22: note = synthetic
ARDDTARRVRGVPYYYYYAMDV

SEQ ID NO: 1754 - protein, 12 aa, synthetic construct
  REGION 1..12: note = synthetic
QSLLDSDDGNIH

SEQ ID NO: 1755 - protein, 6 aa, synthetic construct
  REGION 1..6: note = synthetic
HDIYTY

SEQ ID NO: 1756 - protein, 6 aa, synthetic construct
  REGION 1..6: note = synthetic
QDIDDD

SEQ ID NO: 1757 - protein, 11 aa, synthetic construct
  REGION 1..11: note = synthetic
QSLLYINGYHY

SEQ ID NO: 1758 - protein, 11 aa, synthetic construct
  REGION 1..11: note = synthetic
QSLLHRNGYNY

SEQ ID NO: 1759 - protein, 12 aa, synthetic construct
  REGION 1..12: note = synthetic
QSLLDSDDGNTY

SEQ ID NO: 1760 - protein, 6 aa, synthetic construct
  REGION 1..6: note = synthetic
QDIRNY

SEQ ID NO: 1761 - protein, 6 aa, synthetic construct
  REGION 1..6: note = synthetic
RDISDS

SEQ ID NO: 1762 - protein, 9 aa, synthetic construct
  REGION 1..9: note = synthetic
SGIDVATYM

SEQ ID NO: 1763 - protein, 11 aa, synthetic construct
  REGION 1..11: note = synthetic
QSLLYRNGYNY

SEQ ID NO: 1764 - protein, 6 aa, synthetic construct
  REGION 1..6: note = synthetic
QNIDSS

SEQ ID NO: 1765 - protein, 7 aa, synthetic construct
  REGION 1..7: note = synthet8c
QSVYNNY

SEQ ID NO: 1766 - protein, 11 aa, synthetic construct
  REGION 1..11: note = synthetic
QSLLYSNGYNY

SEQ ID NO: 1767 - protein, 6 aa, synthetic construct
  REGION 1..6: note = synthetic
ESVTTF

SEQ ID NO: 1768 - protein, 11 aa, synthetic construct
  REGION 1..11: note = synthetic
QSLLYRNGHNF

SEQ ID NO: 1769 - protein, 6 aa, synthetic construct
  REGION 1..6: note = synthetic
QTMNNY

SEQ ID NO: 1770-1777 - skipped (8 entries)

SEQ ID NO: 1778 - protein, 7 aa, synthetic construct
  REGION 1..7: note = synthetic
YKSDSDK

SEQ ID NO: 1779-1785 - skipped (7 entries)

SEQ ID NO: 1786 - protein, 9 aa, synthetic construct
  REGION 1..9: note = synthetic
MQRKEFPLT

SEQ ID NO: 1787 - protein, 11 aa, synthetic construct
  REGION 1..11: note = synthetic
QQYDNHPPEVT

SEQ ID NO: 1788 - protein, 9 aa, synthetic construct
  REGION 1..9: note = synthetic
LQHDNLPLT

SEQ ID NO: 1789 - protein, 9 aa, synthetic construct
  REGION 1..9: note = synthetic
MQALQTPPT

SEQ ID NO: 1790 - protein, 9 aa, synthetic construct
  REGION 1..9: note = synthetic
MQALQTPLT

SEQ ID NO: 1791 - protein, 9 aa, synthetic construct
  REGION 1..9: note = synthetic
MQRLQFPLT

SEQ ID NO: 1792 - protein, 9 aa, synthetic construct
  REGION 1..9: note = synthetic
QQFENLPIT

SEQ ID NO: 1793 - protein, 9 aa, synthetic construct
  REGION 1..9: note = synthetic
HQYDNLPLT

SEQ ID NO: 1794 - protein, 9 aa, synthetic construct
  REGION 1..9: note = synthetic
LIWHGSHYV

SEQ ID NO: 1795 - protein, 9 aa, synthetic construct
  REGION 1..9: note = synthetic
MQAVQNPPT

SEQ ID NO: 1796 - protein, 9 aa, synthetic construct
  REGION 1..9: note = synthetic
HQSSSLPLT

SEQ ID NO: 1797 - protein, 10 aa, synthetic construct
  REGION 1..10: note = synthetic
QQYNSWPPYT

SEQ ID NO: 1798 - protein, 9 aa, synthetic construct
  REGION 1..9: note = synthetic
MQARQTPYT

SEQ ID NO: 1799 - protein, 9 aa, synthetic construct
  REGION 1..9: note = synthetic
HQHTNWPLT

SEQ ID NO: 1800 - protein, 9 aa, synthetic construct
  REGION 1..9: note = synthetic
MQALQTPPT

SEQ ID NO: 1801 - protein, 10 aa, synthetic construct
  REGION 1..10: note = synthetic
QQYGDWLPIT

SEQ ID NO: 1802 - protein, 8 aa, synthetic construct
  REGION 1..8: note = synthetic
GYTLTELS

SEQ ID NO: 1803 - protein, 8 aa, synthetic construct
  REGION 1..8: note = synthetic
GGTFSSSA

SEQ ID NO: 1804 - protein, 8 aa, synthetic construct
  REGION 1..8: note = synthetic
GGTFSSYA

SEQ ID NO: 1805 - protein, 8 aa, synthetic construct
  REGION 1..8: note = synthetic
FDPEDGET

SEQ ID NO: 1806 - protein, 8 aa, synthetic construct
  REGION 1..8: note = synthetic
IIPIYGIT

SEQ ID NO: 1807 - protein, 8 aa, synthetic construct
IIPIFGTA

SEQ ID NO: 1808 - protein, 17 aa, synthetic construct
  REGION 1..17: note = synthetic
ATAFPEATISYYYYMDV

SEQ ID NO: 1809 - protein, 22 aa, synthetic construct
  REGION 1..22: note = synthetic
ARDDTARRVRGVPYYYYYAMDV

SEQ ID NO: 1810 - protein, 21 aa, synthetic construct
  REGION 1..21: note = synthetic
ARGPWYYDSSGYSSYAYYMDV

SEQ ID NO: 1811 - protein, 11 aa, synthetic construct
  REGION 1..11: note = synthetic
QSLLYRNGYNY

SEQ ID NO: 1812 - protein, 12 aa, synthetic construct
  REGION 1..12: note = synthetic
RSLLDSDDGNTH

SEQ ID NO: 1813 - protein, 11 aa, synthetic construct
  REGION 1..11: note = synthetic
QSLLHSDGYNY

SEQ ID NO: 1814-1816 - skipped (3 entries)

SEQ ID NO: 1817 - protein, 9 aa, synthetic construct
  REGION 1..9: note = synthetic
MQAVQNPPT

SEQ ID NO: 1818 - protein, 9 aa, synthetic construct
  REGION 1..9: note = synthetic
MQRKEFPLT

SEQ ID NO: 1819 - protein, 10 aa, synthetic construct
  REGION 1..10: note = synthetic
MQALHTPGVT

SEQ ID NO: 1820 - protein, 120 aa, synthetic construct
  REGION 1..120: note = synthetic
EVQLVLSGGGFVQPGGSLKLSCAASGFTFSSYAMSWVRQNPERRLVWVATITGGGRNTYYPDSVKGRFTISRDNAKNTLYLQMSSLRSEDTAMYYCTRQGYDGYTWFAYWGQGTLVTVSS

SEQ ID NO: 1821 - protein, 8 aa, synthetic construct
  REGION 1..8: note = synthetic
GFTFSSYA

SEQ ID NO: 1822 - protein, 8 aa, synthetic construct
  REGION 1..8: note = synthetic
ITGGGRNT

SEQ ID NO: 1823 - protein, 13 aa, synthetic construct
  REGION 1..13: note = synthetic
TRQGYDGYTWFAY

SEQ ID NO: 1824 - protein, 447 aa, synthetic construct
  REGION 1..447: note = synthetic
EVQLVLSGGGFVQPGGSLKLSCAASGFTFSSYAMSWVRQNPERRLVWVATITGGGRNTYYPDSVKGRFTISRDNAKNTLYLQMSSLRSEDTAMYYCTRQGYDGYTWFAYWGQGTLVTVSSASTKGPSVFPLAPCSRSTSESTAALGCLVKDYFPEPVTVSWNSGALTSGVHTFPAVLQSSGLYSLSSVVTVPSSSLGTKTYTCNVDHKPSNTKVDKRVESKYGPPCPPCPAPEFLGGPSVFLFPPKPKDTLMISRTPEVTCVVVDVSQEDPEVQFNWYVDGVEVHNAKTKPREEQFNSTYRVVSVLTVLHQDWLNGKEYKCKVSNKGLPSSIEKTISKAKGQPREPQVYTLPPSQEEMTKNQVSLTCLVKGFYPSDIAVEWESNGQPENNYKTTPPVLDSDGSFFLYSRLTVDKSRWQEGNVFSCSVMHEALHNHYTQKSLSLSPGK

SEQ ID NO: 1825 - protein, 112 aa, synthetic construct
  REGION 1..112: note = synthetic
DIVLTQSPTSLAVSLGQRATISCRASESVDNSGISFMNWFQQKPGQPPKLLIYAASNPGSGVPARFSGSGSGTDFSLNIHPMEEDDTAMYFCQQSKEVPWTFGGGTELEIKR

SEQ ID NO: 1826 - protein, 10 aa, synthetic construct
  REGION 1..10: note = synthetic
ESVDNSGISF

SEQ ID NO: 1827 - skipped

SEQ ID NO: 1828 - protein, 9 aa, synthetic construct
  REGION 1..9: note = synthetic
QQSKEVPWT

SEQ ID NO: 1829 - protein, 218 aa, synthetic construct
  REGION 1..218: note = synthetic
DIVLTQSPTSLAVSLGQRATISCRASESVDNSGISFMNWFQQKPGQPPKLLIYAASNPGSGVPARFSGSGSGTDFSLNIHPMEEDDTAMYFCQQSKEVPWTFGGGTELEIKRTVAAPSVFIFPPSDEQLKSGTASVVCLLNNFYPREAKVQWKVDNALQSGNSQESVTEQDSKDSTYSLSSTLTLSKADYEKHKVYACEVTHQGLSSPVTKSFNRGEC

SEQ ID NO: 1830 - protein, 113 aa, synthetic construct [sequence omitted]

SEQ ID NO: 1831 - protein, 8 aa, synthetic construct
  REGION 1..8: note = synthetic
GITFSNSG

SEQ ID NO: 1832 - protein, 8 aa, synthetic construct
  REGION 1..8: note = synthetic
IWYDGSKR

SEQ ID NO: 1833 - protein, 6 aa, synthetic construct
  REGION 1..6: note = synthetic
ATNDDY

SEQ ID NO: 1834 - protein, 440 aa, synthetic construct
  REGION 1..440: note = synthetic
QVQLVESGGGVVQPGRSLRLDCKASGITFSNSGMHWVRQAPGKGLEWVAVIWYDGSKRYYADSVKGRFTISRDNSKNTLFLQMNSLRAEDTAVYYCATNDDYWGQGTLVTVSSASTKGPSVFPLAPCSRSTSESTAALGCLVKDYFPEPVTVSWNSGALTSGVHTFPAVLQSSGLYSLSSVVTVPSSSLGTKTYTCNVDHKPSNTKVDKRVESKYGPPCPPCPAPEFLGGPSVFLFPPKPKDTLMISRTPEVTCVVVDVSQEDPEVQFNWYVDGVEVHNAKTKPREEQFNSTYRVVSVLTVLHQDWLNGKEYKCKVSNKGLPSSIEKTISKAKGQPREPQVYTLPPSQEEMTKNQVSLTCLVKGFYPSDIAVEWESNGQPENNYKTTPPVLDSDGSFFLYSRLTVDKSRWQEGNVFSCSVMHEALHNHYTQKSLSLSLGK

SEQ ID NO: 1835 - protein, 108 aa, synthetic construct
  REGION 1..108: note = synthetic
EIVLTQSPATLSLSPGERATLSCRASQSVSSYLAWYQQKPGQAPRLLIYDASNRATGIPARFSGSGSGTDFTLTISSLEPEDFAVYYCQQSSNWPRTFGQGTKVEIKR

SEQ ID NO: 1836 - protein, 6 aa, synthetic construct
  REGION 1..6: note = synthetic
QSVSSY

SEQ ID NO: 1837 - skipped

SEQ ID NO: 1838 - protein, 9 aa, synthetic construct
  REGION 1..9: note = synthetic
QQSSNWPRT

SEQ ID NO: 1839 - protein, 214 aa, synthetic construct
  REGION 1..214: note = synthetic
EIVLTQSPATLSLSPGERATLSCRASQSVSSYLAWYQQKPGQAPRLLIYDASNRATGIPARFSGSGSGTDFTLTISSLEPEDFAVYYCQQSSNWPRTFGQGTKVEIKRTVAAPSVFIFPPSDEQLKSGTASVVCLLNNFYPREAKVQWKVDNALQSGNSQESVTEQDSKDSTYSLSSTLTLSKADYEKHKVYACEVTHQGLSSPVTKSFNRGEC

SEQ ID NO: 1840 - protein, 121 aa, synthetic construct
  REGION 1..121: note = synthetic
EVQLVESGGGLVQPGGSLRLSCAASGFTFSRYWMSWVRQAPGKGLEWVANIKQDGSEKYYVDSVKGRFTISRDNAKNSLYLQMNSLRAEDTAVYYCAREGGWFGELAFDYWGQGTLVTVSS

SEQ ID NO: 1841 - protein, 5 aa, synthetic construct
  REGION 1..5: note = synthetic
RYWMS

SEQ ID NO: 1842 - protein, 17 aa, synthetic construct
  REGION 1..17: note = synthetic
NIKQDGSEKYYVDSVKG

SEQ ID NO: 1843 - protein, 11 aa, synthetic construct
  REGION 1..11: note = synthetic
EGGWFGELAFD

SEQ ID NO: 1844 - protein, 108 aa, synthetic construct
  REGION 1..108: note = synthetic
EIVLTQSPGTLSLSPGERATLSCRASQRVSSSYLAWYQQKPGQAPRLLIYDASSRATGIPDRFSGSGSGTDFTLTISRLEPEDFAVYYCQQYGSLPWTFGQGTKVEIK

SEQ ID NO: 1845 - protein, 12 aa, synthetic construct
  REGION 1..12: note = synthetic
RASQRVSSSYLA

SEQ ID NO: 1846 - protein, 7 aa, synthetic construct
  REGION 1..7: note = synthetic
DASSRAT

SEQ ID NO: 1847 - protein, 9 aa, synthetic construct
  REGION 1..9: note = synthetic
QQYGSLPWT

SEQ ID NO: 1848 - protein, 447 aa, synthetic construct
  REGION 1..447: note = synthetic
EVQLVESGGGLVQPGGSLRLSCAASGFTFSDSWIHWVRQAPGKGLEWVAWISPYGGSTYYADSVKGRFTISADTSKNTAYLQMNSLRAEDTAVYYCARRHWPGGFDYWGQGTLVTVSAASTKGPSVFPLAPSSKSTSGGTAALGCLVKDYFPEPVTVSWNSGALTSGVHTFPAVLQSSGLYSLSSVVTVPSSSLGTQTYICNVNHKPSNTKVDKKVEPKSCDKTHTCPPCPAPELLGGPSVFLFPPKPKDTLMISRTPEVTCVVVDVSHEDPEVKFNWYVDGVEVHNAKTKPREEQYASTYRVVSVLTVLHQDWLNGKEYKCKVSNKALPAPIEKTISKAKGQPREPQVYTLPPSRDELTKNQVSLTCLVKGFYPSDIAVEWESNGQPENNYKTTPPVLDSDGSFFLYSKLTVDKSRWQQGNVFSCSVMHEALHNHYTQKSLSLSPG

SEQ ID NO: 1849 - protein, 214 aa, synthetic construct
  REGION 1..214: note = synthetic
DIQMTQSPSSLSASVGDRVTITCRASQDVSTAVAWYQQKPGKAPKLLIYSASFLYSGVPSRFSGSGSGTDFTLTISSLQPEDFATYYCQQYLFTPPTFGQGTKVEIKRTVAAPSVFIFPPSDEQLKSGTASVVCLLNNFYPREAKVQWKVDNALQSGNSQESVTEQDSKDSTYSLSSTLTLSKADYEKHKVYACEVTHQGLSSPVTKSFNRGEC

SEQ ID NO: 1850 - protein, 118 aa, synthetic construct
  REGION 1..118: note = synthetic
EVQLVESGGGLVQPGGSLRLSCAASGFTFSDSWIHWVRQAPGKGLEWVAWISPYGGSTYYADSVKGRFTISADTSKNTAYLQMNSLRAEDTAVYYCARRHWPGGFDYWGQGTLVTVSA

SEQ ID NO: 1851 - protein, 10 aa, synthetic construct
  REGION 1..10: note = synthetic
GFTFSDSWIH

SEQ ID NO: 1852 - protein, 18 aa, synthetic construct
  REGION 1..18: note = synthetic
AWISPYGGSTYYADSVKG

SEQ ID NO: 1853 - protein, 9 aa, synthetic construct
  REGION 1..9: note = synthetic
RHWPGGFDY

SEQ ID NO: 1854 - protein, 108 aa, synthetic construct
  REGION 1..108: note = synthetic
DIQMTQSPSSLSASVGDRVTITCRASQDVSTAVAWYQQKPGKAPKLLIYSASFLYSGVPSRFSGSGSGTDFTLTISSLQPEDFATYYCQQYLYHPATFGQGTKVEIKR

SEQ ID NO: 1855 - protein, 11 aa, synthetic construct
  REGION 1..11: note = synthetic
RASQDVSTAVA

SEQ ID NO: 1856 - protein, 7 aa, synthetic construct
  REGION 1..7: note = synthetic
SASFLYS

SEQ ID NO: 1857 - protein, 9 aa, synthetic construct
  REGION 1..9: note = synthetic
QQYLYHPAT

SEQ ID NO: 1858 - protein, 122 aa, synthetic construct
  REGION 1..122: note = synthetic
EVQLVESGGGLVQPGGSLRLSCAASGFTFSDSWIHWVRQAPGKGLEWVAWISPYGGSTYYADSVKGRFTISADTSKNTAYLQMNSLRAEDTAVYYCARRHWPGGFDYWGQGTLVTVSSASTK

SEQ ID NO: 1859 - protein, 108 aa, synthetic construct; identical to SEQ ID NO: 1854
  REGION 1..108: note = synthetic

SEQ ID NO: 1860 - protein, 118 aa, synthetic construct [sequence omitted]

SEQ ID NO: 1861 - protein, 108 aa, synthetic construct; identical to SEQ ID NO: 1854
  REGION 1..108: note = synthetic

SEQ ID NO: 1862 - protein, 118 aa, synthetic construct
  REGION 1..118: note = synthetic
EVQLVESCGGLVQPGGSLRLSCAASGFTFSDSWIHWVRQAPGKGLEWVAWISPYGGSTYYADSVKGRFTISRDTSKNTAYLQMNSLRAEDTAVYYCARRHWPGGFDYWGQGTLVTVSA

SEQ ID NO: 1863 - protein, 118 aa, synthetic construct
  REGION 1..118: note = synthetic
EVQLVESGGGLVQPGGSLRLSCAASGFTFSDSWIHWVRQAPGKGLEWVAWISPYGGSTYYADSVKGRFTISRDTSKNTAYLQMNSLRAEDTAVYYCARRHWPGGFDYWGQGTLVTVSA

SEQ ID NO: 1864 - protein, 118 aa, synthetic construct
  REGION 1..118: note = synthetic
EVQLVESGGGLVQPGGSLRLSCAASGFTFSGSWIHWVRQAPGKGLEWVAWILPYGGSSYYADSVKGRFTISRDTSKNTAYLQMNSLRAEDTAVYYCARRHWPGGFDYWGQGTLVTVSA

SEQ ID NO: 1865 - protein, 108 aa, synthetic construct; identical to SEQ ID NO: 1854
  REGION 1..108: note = synthetic

SEQ ID NO: 1866 - protein, 108 aa, synthetic construct
  REGION 1..108: note = synthetic
DIQMTQSPSSLSASVGDRVTITCRASQDVSTAVAWYQQKPGKAPKLLIYSASFLYSGVPSRFSGSGSGTDFTLTISSLQPEDFATYYCQQYYNVPWTFGQGTKVEIKR

SEQ ID NO: 1867 - protein, 108 aa, synthetic construct
  REGION 1..108: note = synthetic
DIQMTQSPSSLSASVGDRVTITCRASQDVSTAVAWYQQKPGKAPKLLIYSASFLYSGVPSRFSGSGSGTDFTLTISSLQPEDFATYYCQQYYAPPWTFGQGTKVEIKR

SEQ ID NO: 1868 - protein, 108 aa, synthetic construct
  REGION 1..108: note = synthetic
DIQMTQSPSSLSASVGDRVTITCRASQDVSTAVAWYQQKPGKAPKLLIYSASFLYSGVPSRFSGSGSGTDFTLTISSLQPEDFATYYCQQYYTVPWTFGQGTKVEIKR

SEQ ID NO: 1869 - protein, 108 aa, synthetic construct
  REGION 1..108: note = synthetic
DIQMTQSPSSLSASVGDRVTITCRASQVINTFLAWYQQKPGKAPKLLIYSASTLASGVPSRFSGSGSGTDFTLTISSLQPEDFATYYCQQYYTVPRTFGQGTKVEIKR

SEQ ID NO: 1870 - protein, 108 aa, synthetic construct
  REGION 1..108: note = synthetic
DIQMTQSPSSLSASVGDRVTITCRASQDVSTAVAWYQQKPGKAPKLLIYSASFLYSGVPSRFSGSGSGTDFTLTISSLQPEDFATYYCQQGYGVPRTFGQGTKVEIKR

SEQ ID NO: 1871 - protein, 108 aa, synthetic construct
  REGION 1..108: note = synthetic
DIQMTQSPSSLSASVGDRVTITCRASQDVSTAVAWYQQKPGKAPKLLIYSASFLYSGVPSRFSGSGSGTDFTLTISSLQPEDFATYYCQQYLFTPPTFGQGTKVEIKR

SEQ ID NO: 1872 - protein, 108 aa, synthetic construct
  REGION 1..108: note = synthetic
DIQMTQSPSSLSASVGDRVTITCRASQDVSTAVAWYQQKPGKAPKLLIYSASFLYSGVPSRFSGSGSGTDFTLTISSLQPEDFATYYCQQYFITPTTFGQGTKVEIKR

SEQ ID NO: 1873 - protein, 107 aa, synthetic construct
  REGION 1..107: note = synthetic
DIQMTQSPSSLSASVGDRVTITCRASQDVSTAVAWYQQKPGKAPKLLIYSASFLYSGVPSRFSGSGSGTDFTLTISSLQPEDFATYYCQQYYTPPTFGQGTKVEIKR

SEQ ID NO: 1874 - protein, 108 aa, synthetic construct
  REGION 1..108: note = synthetic
DIQMTQSPSSLSASVGDRVTITCRASQDVSTAVAWYQQKPGKAPKLLIYSASFLYSGVPSRFSGSGSGTDFTLTISSLQPEDFATYYCQQFFYTPPTFGQGTKVEIKR

SEQ ID NO: 1875 - protein, 108 aa, synthetic construct
  REGION 1..108: note = synthetic
DIQMTQSPSSLSASVGDRVTITCRASQDVSTAVAWYQQKPGKAPKLLIYSASFLYSGVPSRFSGSGSGTDFTLTISSLQPEDFATYYCQQSLFTPPTFGQGTKVEIKR

SEQ ID NO: 1876 - protein, 108 aa, synthetic construct
  REGION 1..108: note = synthetic
DIQMTQSPSSLSASVGDRVTITCRASQDVSTAVAWYQQKPGKAPKLLIYSASFLYSGVPSRFSGSGSGTDFTLTISSLQPEDFATYYCQQSLYTPPTFGQGTKVEIKR

SEQ ID NO: 1877 - protein, 108 aa, synthetic construct
  REGION 1..108: note = synthetic
DIQMTQSPSSLSASVGDRVTITCRASQDVSTAVAWYQQKPGKAPKLLIYSASFLYSGVPSRFSGSGSGTDFTLTISSLQPEDFATYYCQQSWYHPPTFGQGTKVEIKR

SEQ ID NO: 1878 - protein, 108 aa, synthetic construct
  REGION 1..108: note = synthetic
DIQMTQSPSSLSASVGDRVTITCRASQDVSTAVAWYQQKPGKAPKLLIYSASFLYSGVPSRFSGSGSGTDFTLTISSLQPEDFATYYCQQYFYIPPTFGQGTKVEIKR

SEQ ID NO: 1879 - protein, 108 aa, synthetic construct
  REGION 1..108: note = synthetic
DIQMTQSPSSLSASVGDRVTITCRASQDVSTAVAWYQQKPGKAPKLLIYSASFLYSGVPSRFSGSGSGTDFTLTISSLQPEDFATYYCQQYWYTPYTFGQGTKVEIKR

SEQ ID NO: 1880 - protein, 108 aa, synthetic construct
  REGION 1..108: note = synthetic
DIQMTQSPSSLSASVGDRVTITCRASQDVSTAVAWYQQKPGKAPKLLIYSASFLYSGVPSRFSGSGSGTDFTLTISSLQPEDFATYYCQQSYFIPPTFGQGTKVEIKR

SEQ ID NO: 1881 - protein, 450 aa, synthetic construct
  REGION 1..450: note = synthetic
EVQLLESGGGLVQPGGSLRLSCAASGFTFSSYIMMWVRQAPGKGLEWVSSIYPSGGITFYADTVKGRFTISRDNSKNTLYLQMNSLRAEDTAVYYCARIKLGTVTTVDYWGQGTLVTVSSASTKGPSVFPLAPSSKSTSGGTAALGCLVKDYFPEPVTVSWNSGALTSGVHTFPAVLQSSGLYSLSSVVTVPSSSLGTQTYICNVNHKPSNTKVDKKVEPKSCDKTHTCPPCPAPELLGGPSVFLFPPKPKDTLMISRTPEVTCVVVDVSHEDPEVKFNWYVDGVEVHNAKTKPREEQYNSTYRVVSVLTVLHQDWLNGKEYKCKVSNKALPAPIEKTISKAKGQPREPQVYTLPPSRDELTKNQVSLTCLVKGFYPSDIAVEWESNGQPENNYKTTPPVLDSDGSFFLYSKLTVDKSRWQQGNVFSCSVMHEALHNHYTQKSLSLSPGK

SEQ ID NO: 1882 - protein, 216 aa, synthetic construct
  REGION 1..216: note = synthetic
QSALTQPASVSGSPGQSITISCTGTSSDVGGYNYVSWYQQHPGKAPKLMIYDVSNRPSGVSNRFSGSKSGNTASLTISGLQAEDEADYYCSSYTSSSTRVFGTGTKVTVLGQPKANPTVTLFPPSSEELQANKATLVCLISDFYPGAVTVAWKADGSPVKAGVETTKPSKQSNNKYAASSYLSLTPEQWKSHRSYSCQVTHEGSTVEKTVAPTECS

SEQ ID NO: 1883 - protein, 118 aa, synthetic construct; identical to SEQ ID NO: 1850
  REGION 1..118: note = synthetic

SEQ ID NO: 1884 - protein, 106 aa, synthetic construct
  REGION 1..106: note = synthetic
DIQMTQSPSSLSASVGDRVTITCRASQDVSTAVAWYQQKPGKAPKWYSASFLYSGVPSRFSGSGSGTDFTLTISSLQPEDFATYYCQQYLYHPATFGQGTKVEIKR

SEQ ID NO: 1885 - protein, 448 aa, synthetic construct
  REGION 1..448: note = synthetic
EVQLVESGGGLVQPGGSLRLSCAASGFTFSDSWIHWVRQAPGKGLEWVAWISPYGGSTYYADSVKGRFTISADTSKNTAYLQMNSLRAEDTAVYYCARRHWPGGFDYWGQGTLVTVSSASTKGPSVFPLAPSSKSTSGGTAALGCLVKDYFPEPVTVSWNSGALTSGVHTFPAVLQSSGLYSLSSVVTVPSSSLGTQTYICNVNHKPSNTKVDKKVEPKSCDKTHTCPPCPAPELLGGPSVFLFPPKPKDTLMISRTPEVTCVVVDVSHEDPEVKFNWYVDGVEVHNAKTKPREEQYASTYRVVSVLTVLHQDWLNGKEYKCKVSNKALPAPIEKTISKAKGQPREPQVYTLPPSREEMTKNQVSLTCLVKGFYPSDIAVEWESNGQPENNYKTTPPVLDSDGSFFLYSKLTVDKSRWQQGNVFSCSVMHEALHNHYTQKSLSLSPGK

SEQ ID NO: 1886 - protein, 214 aa, synthetic construct
  REGION 1..214: note = synthetic
DIQMTQSPSSLSASVGDRVTITCRASQDVSTAVAWYQQKPGKAPKLLIYSASFLYSGVPSRFSGSGSGTDFTLTISSLQPEDFATYYCQQYLYHPATFGQGTKVEIKRTVAAPSVFIFPPSDEQLKSGTASVVCLLNNFYPREAKVQWKVDNALQSGNSQESVTEQDSKDSTYSLSSTLTLSKADYEKHKVYACEVTHQGLSSPVTKSFNRGEC

SEQ ID NO: 1887 - protein, 9 aa, synthetic construct
  REGION 1..9: note = SYNTHETIC
  VARIANT 4: note = X is S, D or G
  VARIANT 6: note = X is Y, V or T
FTFXNXAMS

SEQ ID NO: 1888 - protein, 17 aa, synthetic construct
  REGION 1..17: note = synthetic
  VARIANT 4: note = X is G or A
  VARIANT 5: note = X is N or S
  VARIANT 6: note = X is A or G
AISXXXGSTYYADSVKG

SEQ ID NO: 1889 - protein, 11 aa, synthetic construct
  REGION 1..11: note = synthetic
AKGPDRQVFDY

SEQ ID NO: 1890 - protein, 11 aa, synthetic construct
  REGION 1..11: note = synthetic
  VARIANT 7: note = X is S or D
RASQGIXSWLA

SEQ ID NO: 1891 - protein, 7 aa, synthetic construct
  REGION 1..7: note = synthetic
AASSLQS

SEQ ID NO: 1892 - protein, 9 aa, synthetic construct
  REGION 1..9: note = synthetic
  VARIANT 4: note = X is Y or L
  VARIANT 5: note = X is S or F
QHAXXFPYT

SEQ ID NO: 1893 - protein, 9 aa, synthetic construct
  REGION 1..9: note = synthetic
  VARIANT 4: note = X is N, R, D, G or K
  VARIANT 5: note = X is S, H, I or Q
  VARIANT 8: note = X is M or V
YTFXXYAXH

SEQ ID NO: 1894 - protein, 17 aa, synthetic construct
  REGION 1..17: note = synthetic
  VARIANT 8: note = X is A, V or N
  VARIANT 10: note = X is K or L
WIHAGTGXTXYSQKFQG

SEQ ID NO: 1895 - protein, 17 aa, synthetic construct
  REGION 1..17: note = synthetic
  VARIANT 6: note = X is E or S
ARGLGXVGPTGTSWFDP

SEQ ID NO: 1896 - protein, 11 aa, synthetic construct
  REGION 1..11: note = synthetic
RASQSISSWLA

SEQ ID NO: 1897 - protein, 7 aa, synthetic construct
  REGION 1..7: note = synthetic
EASSLES

SEQ ID NO: 1898 - protein, 9 aa, synthetic construct
  REGION 1..9: note = synthetic
  VARIANT 5: note = X is V, Q, Y, L or S
  VARIANT 6: note = X is F, S or G
QQYRXXPFT

SEQ ID NO: 1899 - protein, 9 aa, synthetic construct
  REGION 1..9: note = synthetic
  VARIANT 4: note = X is N or S
  VARIANT 5: note = X is S or E
  VARIANT 7: note = X is V or P
GTFXXYXIS

SEQ ID NO: 1900 - protein, 17 aa, synthetic construct
  REGION 1..17: note = synthetic
  VARIANT 5: note = X is G or Y
  VARIANT 6: note = X is A or S
  VARIANT 10: note = X is N, I or V
GIIPXXGTAXYAQKFQG

SEQ ID NO: 1901 - protein, 9 aa, synthetic construct
  REGION 1..9: note = synthetic
  VARIANT 6: note = X is S, F or G
ARGRHXHET

SEQ ID NO: 1902 - protein, 11 aa, synthetic construct
  REGION 1..11: note = synthetic
RASQGISSWLA

SEQ ID NO: 1903 - protein, 7 aa, synthetic construct
  REGION 1..7: note = synthetic
AASSLQS

SEQ ID NO: 1904 - protein, 9 aa, synthetic construct
  REGION 1..9: note = synthetic
  VARIANT 5: note = X is S or R
  VARIANT 6: note = X is L, F or I
QQVYXXPWT

SEQ ID NO: 1905 - protein, 11 aa, synthetic construct
  REGION 1..11: note = synthetic
  VARIANT 6: note = X is S or P
  VARIANT 7: note = X is D or E
  VARIANT 9: note = X is Y, G or P
GSISSXXYXWG

SEQ ID NO: 1906 - protein, 16 aa, synthetic construct
  REGION 1..16: note = syntheticv
  VARIANT 3: note = X is V or Y
  VARIANT 4: note = X is N or Y
  VARIANT 5: note = X is S or Q
  VARIANT 7: note = X is S or A
SIXXXGXTYYNPSLKS

SEQ ID NO: 1907 - protein, 11 aa, synthetic construct
  REGION 1..11: note = synthetic
  VARIANT 5: note = X is H or Y
  VARIANT 8: note = X is V or L
ARGPXRQXFDY

SEQ ID NO: 1908 - protein, 11 aa, synthetic construct
  REGION 1..11: note = synthetic
RASQGISSWLA

SEQ ID NO: 1909 - protein, 7 aa, synthetic construct
  REGION 1..7: note = synthetic
AASSLQS

SEQ ID NO: 1910 - protein, 9 aa, synthetic construct
  REGION 1..9: note = synthetic
  VARIANT 4: note = X is S or F
  VARIANT 5: note = X is S or V
QQGXXFPYT

SEQ ID NO: 1911 - protein, 11 aa, synthetic construct
  REGION 1..11: note = synthetic
  VARIANT 4: note = X is S or F
  VARIANT 6: note = X is S or P
  VARIANT 7: note = X is E or D
  VARIANT 9: note = X is G, P or Y
  VARIANT 11: note = X is G or S
GSIXSXXYXWX

SEQ ID NO: 1912 - protein, 16 aa, synthetic construct
  REGION 1..16: note = synthetic
  VARIANT 1: note = X is S or V
  VARIANT 3: note = X is V, Y, F or A
  VARIANT 4: note = X is N or Y
  VARIANT 5: note = X is S or Q
  VARIANT 7: note = X is S, A or N
XIXXXGXTYYNPSLKS

SEQ ID NO: 1913 - protein, 11 aa, synthetic construct
  REGION 1..11: note = synthetic
  VARIANT 5: note = X is H, Y or F
  VARIANT 8: note = X is V or L
ARGPXRQXFDY

SEQ ID NO: 1914 - protein, 11 aa, synthetic construct
  REGION 1..11: note = synthetic
RASQGISSWLA

SEQ ID NO: 1915 - protein, 7 aa, synthetic construct
  REGION 1..7: note = synthetic
AASSLQS

SEQ ID NO: 1916 - protein, 9 aa, synthetic construct
  REGION 1..9: note = synthetic
  VARIANT 4: note = X is S, F, N or W
  VARIANT 5: note = X is S or V
QQGXXFPYT

1. An anti-IL18-BP (interleukin-18 binding protein) antibody wherein the antibody antagonizes at least one immune inhibitory effect of IL18-BP, and/or wherein the anti-IL18-BP antibody blocks the IL18:IL18-BP binding interaction, and/or wherein the anti-IL18-BP antibody exhibits a binding affinity or KD of lower than 1 pM.

2. The anti-IL18-BP antibody of claim 1, wherein the antibody activates T cells, NK cells, NKT cells, Dendritic cells, MAIT T cells, γδ T cells, and/or innate lymphoid cells (ILCs), and/or modulates Myeloid cells.

3. (canceled)

4. An anti-IL18-BP antibody, wherein said antibody comprises: the vhCDR1), vhCDR2), vhCDR3, VlCDR1, VlCDR2) and vlCDR3 sequences selected from the group consisting of:
i. the vhCDR1 having the amino acid sequence of SEQ ID NO: 155,
the vhCDR2 having the amino acid sequence of SEQ ID NO: 156,
the vhCDR3 having the amino acid sequence of SEQ ID NO: 157,
the vlCDR1 having the amino acid sequence of SEQ ID NO: 160,
the vlCDR2 having the amino acid sequence of SEQ ID NO: 161, and
the vlCDR3 having the amino acid sequence of SEQ ID NO: 162;
ii. the vhCDR1 having the amino acid sequence of SEQ ID NO: 7,
the vhCDR2 having the amino acid sequence of SEQ ID NO: 8,
the vhCDR3 having the amino acid sequence of SEQ ID NO: 9,
the vlCDR1 having the amino acid sequence of SEQ ID NO: 10,
the vlCDR2 having the amino acid sequence of SEQ ID NO: 11 and
the vlCDR3 having the amino acid sequence of SEQ ID NO: 12;
iii. the vhCDR1 having the amino acid sequence of SEQ ID NO: 13,
the vhCDR2 having the amino acid sequence of SEQ ID NO: 14,
the vhCDR3 having the amino acid sequence of SEQ ID NO: 15,
the vlCDR1 having the amino acid sequence of SEQ ID NO: 16,
the vlCDR2 having the amino acid sequence of SEQ ID NO: 17 and
the vlCDR3 having the amino acid sequence of SEQ ID NO: 18;
iv. the vhCDR1 having the amino acid sequence of SEQ ID NO: 19,
the vhCDR2 having the amino acid sequence of SEQ ID NO: 20,
the vhCDR3 having the amino acid sequence of SEQ ID NO: 219,
the vlCDR1 having the amino acid sequence of SEQ ID NO: 22,
the vlCDR2 having the amino acid sequence of SEQ ID NO: 23 and
the vlCDR3 having the amino acid sequence of SEQ ID NO: 24;
v. the vhCDR1 having the amino acid sequence of SEQ ID NO: 25,
the vhCDR2 having the amino acid sequence of SEQ ID NO: 26,
the vhCDR3 having the amino acid sequence of SEQ ID NO: 27,
the vlCDR1 having the amino acid sequence of SEQ ID NO: 28,
the vlCDR2 having the amino acid sequence of SEQ ID NO: 29 and
the vlCDR3 having the amino acid sequence of SEQ ID NO: 30;
vi. the vhCDR1 having the amino acid sequence of SEQ ID NO: 31,
the vhCDR2 having the amino acid sequence of SEQ ID NO: 32,
the vhCDR3 having the amino acid sequence of SEQ ID NO: 33,
the vlCDR1 having the amino acid sequence of SEQ ID NO: 34,
the vlCDR2 having the amino acid sequence of SEQ ID NO: 35 and
the vlCDR3 having the amino acid sequence of SEQ ID NO: 36;
vii. the vhCDR1 having the amino acid sequence of SEQ ID NO: 37,
the vhCDR2 having the amino acid sequence of SEQ ID NO: 38,
the vhCDR3 having the amino acid sequence of SEQ ID NO: 39,
the vlCDR1 having the amino acid sequence of SEQ ID NO: 40,
the vlCDR2 having the amino acid sequence of SEQ ID NO: 41 and
the vlCDR3 having the amino acid sequence of SEQ ID NO: 42;
viii. the vhCDR1 having the amino acid sequence of SEQ ID NO: 43,
the vhCDR2 having the amino acid sequence of SEQ ID NO: 44,
the vhCDR3 having the amino acid sequence of SEQ ID NO: 45,
the vlCDR1 having the amino acid sequence of SEQ ID NO: 46,
the vlCDR2 having the amino acid sequence of SEQ ID NO: 47 and
the vlCDR3 having the amino acid sequence of SEQ ID NO: 48;
ix. the vhCDR1 having the amino acid sequence of SEQ ID NO: 844,
the vhCDR2 having the amino acid sequence of SEQ ID NO: 845,
the vhCDR3 having the amino acid sequence of SEQ ID NO: 846,
the vlCDR1 having the amino acid sequence of SEQ ID NO: 847,
the vlCDR2 having the amino acid sequence of SEQ ID NO: 848 and
the vlCDR3 having the amino acid sequence of SEQ ID NO: 849;
x. the vhCDR1 having the amino acid sequence of SEQ ID NO: 850,
the vhCDR2 having the amino acid sequence of SEQ ID NO: 851,
the vhCDR3 having the amino acid sequence of SEQ ID NO: 852,
the vlCDR1 having the amino acid sequence of SEQ ID NO: 853,
the vlCDR2 having the amino acid sequence of SEQ ID NO: 854 and
the vlCDR3 having the amino acid sequence of SEQ ID NO: 855;
xi. the vhCDR1 having the amino acid sequence of SEQ ID NO: 856,
the vhCDR2 having the amino acid sequence of SEQ ID NO: 857,
the vhCDR3 having the amino acid sequence of SEQ ID NO: 858,
the vlCDR1 having the amino acid sequence of SEQ ID NO: 859,
the vlCDR2 having the amino acid sequence of SEQ ID NO: 860 and
the vlCDR3 having the amino acid sequence of SEQ ID NO: 861;
xii. the vhCDR1 having the amino acid sequence of SEQ ID NO: 862,
the vhCDR2 having the amino acid sequence of SEQ ID NO: 863,
the vhCDR3 having the amino acid sequence of SEQ ID NO: 864,
the vlCDR1 having the amino acid sequence of SEQ ID NO: 865,
the vlCDR2 having the amino acid sequence of SEQ ID NO: 866 and
the vlCDR3 having the amino acid sequence of SEQ ID NO: 867;
xiii. the vhCDR1 having the amino acid sequence of SEQ ID NO: 55,
the vhCDR2 having the amino acid sequence of SEQ ID NO: 56,
the vhCDR3 having the amino acid sequence of SEQ ID NO: 57,
the vlCDR1 having the amino acid sequence of SEQ ID NO: 60,
the vlCDR2 having the amino acid sequence of SEQ ID NO: 61 and
the vlCDR3 having the amino acid sequence of SEQ ID NO: 62;
xiv. the vhCDR1 having the amino acid sequence of SEQ ID NO: 65,
the vhCDR2 having the amino acid sequence of SEQ ID NO: 66,
the vhCDR3 having the amino acid sequence of SEQ ID NO: 67,
the vlCDR1 having the amino acid sequence of SEQ ID NO: 70,
the vlCDR2 having the amino acid sequence of SEQ ID NO: 71 and
the vlCDR3 having the amino acid sequence of SEQ ID NO: 72;
xv. the vhCDR1 having the amino acid sequence of SEQ ID NO: 75,
the vhCDR2 having the amino acid sequence of SEQ ID NO: 76,
the vhCDR3 having the amino acid sequence of SEQ ID NO: 77,
the vlCDR1 having the amino acid sequence of SEQ ID NO: 80,
the vlCDR2 having the amino acid sequence of SEQ ID NO: 81 and
the vlCDR3 having the amino acid sequence of SEQ ID NO: 82;
xvi. the vhCDR1 having the amino acid sequence of SEQ ID NO: 85,
the vhCDR2 having the amino acid sequence of SEQ ID NO: 86,
the vhCDR3 having the amino acid sequence of SEQ ID NO: 87,
the vlCDR1 having the amino acid sequence of SEQ ID NO: 90,
the vlCDR2 having the amino acid sequence of SEQ ID NO: 91 and
the vlCDR3 having the amino acid sequence of SEQ ID NO: 92;
xvii. the vhCDR1 having the amino acid sequence of SEQ ID NO: 95,
the vhCDR2 having the amino acid sequence of SEQ ID NO: 96,
the vhCDR3 having the amino acid sequence of SEQ ID NO: 97,
the vlCDR1 having the amino acid sequence of SEQ ID NO: 100,
the vlCDR2 having the amino acid sequence of SEQ ID NO: 101 and
the vlCDR3 having the amino acid sequence of SEQ ID NO: 102;
xviii. the vhCDR1 having the amino acid sequence of SEQ ID NO: 105,
the vhCDR2 having the amino acid sequence of SEQ ID NO: 106,
the vhCDR3 having the amino acid sequence of SEQ ID NO: 107,
the vlCDR1 having the amino acid sequence of SEQ ID NO: 110,
the vlCDR2 having the amino acid sequence of SEQ ID NO: 111 and
the vlCDR3 having the amino acid sequence of SEQ ID NO: 112;
xix. the vhCDR1 having the amino acid sequence of SEQ ID NO: 115,
the vhCDR2 having the amino acid sequence of SEQ ID NO: 116,
the vhCDR3 having the amino acid sequence of SEQ ID NO: 117,
the vlCDR1 having the amino acid sequence of SEQ ID NO: 120,
the vlCDR2 having the amino acid sequence of SEQ ID NO: 121 and
the vlCDR3 having the amino acid sequence of SEQ ID NO: 122;
xx. the vhCDR1 having the amino acid sequence of SEQ ID NO: 125,
the vhCDR2 having the amino acid sequence of SEQ ID NO: 126,
the vhCDR3 having the amino acid sequence of SEQ ID NO: 127,
the vlCDR1 having the amino acid sequence of SEQ ID NO: 130,
the vlCDR2 having the amino acid sequence of SEQ ID NO: 131 and
the vlCDR3 having the amino acid sequence of SEQ ID NO: 132;
xxi. the vhCDR1 having the amino acid sequence of SEQ ID NO: 135,
the vhCDR2 having the amino acid sequence of SEQ ID NO: 136,
the vhCDR3 having the amino acid sequence of SEQ ID NO: 137,
the vlCDR1 having the amino acid sequence of SEQ ID NO: 140,
the vlCDR2 having the amino acid sequence of SEQ ID NO: 141 and
the vlCDR3 having the amino acid sequence of SEQ ID NO: 142;
xxii. the vhCDR1 having the amino acid sequence of SEQ ID NO: 145,
the vhCDR2 having the amino acid sequence of SEQ ID NO: 146,
the vhCDR3 having the amino acid sequence of SEQ ID NO: 147,
the vlCDR1 having the amino acid sequence of SEQ ID NO: 150,
the vlCDR2 having the amino acid sequence of SEQ ID NO: 151 and
the vlCDR3 having the amino acid sequence of SEQ ID NO: 152;
xxiii. the vhCDR1 having the amino acid sequence of SEQ ID NO: 1,
the vhCDR2 having the amino acid sequence of SEQ ID NO: 2,
the vhCDR3 having the amino acid sequence of SEQ ID NO: 3,
the vlCDR1 having the amino acid sequence of SEQ ID NO: 4,
the vlCDR2 having the amino acid sequence of SEQ ID NO: 5 and
the vlCDR3 having the amino acid sequence of SEQ ID NO: 6;
xxiv. the vhCDR1 having the amino acid sequence of SEQ ID NO: 165,
the vhCDR2 having the amino acid sequence of SEQ ID NO: 166,
the vhCDR3 having the amino acid sequence of SEQ ID NO: 167,
the vlCDR1 having the amino acid sequence of SEQ ID NO: 170,
the vlCDR2 having the amino acid sequence of SEQ ID NO: 171 and
the vlCDR3 having the amino acid sequence of SEQ ID NO: 172;
xxv. the vhCDR1 having the amino acid sequence of SEQ ID NO: 175,
the vhCDR2 having the amino acid sequence of SEQ ID NO: 176,
the vhCDR3 having the amino acid sequence of SEQ ID NO: 177,
the vlCDR1 having the amino acid sequence of SEQ ID NO: 180,
the vlCDR2 having the amino acid sequence of SEQ ID NO: 181 and
the vlCDR3 having the amino acid sequence of SEQ ID NO: 182;
xxvi. the vhCDR1 having the amino acid sequence of SEQ ID NO: 185,
the vhCDR2 having the amino acid sequence of SEQ ID NO: 186,
the vhCDR3 having the amino acid sequence of SEQ ID NO: 187,
the vlCDR1 having the amino acid sequence of SEQ ID NO: 190,
the vlCDR2 having the amino acid sequence of SEQ ID NO: 191 and
the vlCDR3 having the amino acid sequence of SEQ ID NO: 192;
xxvii. the vhCDR1 having the amino acid sequence of SEQ ID NO: 195,
the vhCDR2 having the amino acid sequence of SEQ ID NO: 196,
the vhCDR3 having the amino acid sequence of SEQ ID NO: 197,
the vlCDR1 having the amino acid sequence of SEQ ID NO: 200,
the vlCDR2 having the amino acid sequence of SEQ ID NO: 2019 and
the vlCDR3 having the amino acid sequence of SEQ ID NO: 202;
xxviii. the vhCDR1 having the amino acid sequence of SEQ ID NO: 205,
the vhCDR2 having the amino acid sequence of SEQ ID NO: 206,
the vhCDR3 having the amino acid sequence of SEQ ID NO: 207,
the vlCDR1 having the amino acid sequence of SEQ ID NO: 210,
the vlCDR2 having the amino acid sequence of SEQ ID NO: 211 and
the vlCDR3 having the amino acid sequence of SEQ ID NO: 212;
xxix. the vhCDR1 having the amino acid sequence of SEQ ID NO: 215,
the vhCDR2 having the amino acid sequence of SEQ ID NO: 216,
the vhCDR3 having the amino acid sequence of SEQ ID NO: 217,
the vlCDR1 having the amino acid sequence of SEQ ID NO: 220,
the vlCDR2 having the amino acid sequence of SEQ ID NO: 221 and
the vlCDR3 having the amino acid sequence of SEQ ID NO: 222;
xxx. the vhCDR1 having the amino acid sequence of SEQ ID NO: 225,
the vhCDR2 having the amino acid sequence of SEQ ID NO: 226,
the vhCDR3 having the amino acid sequence of SEQ ID NO: 227,
the vlCDR1 having the amino acid sequence of SEQ ID NO: 230,
the vlCDR2 having the amino acid sequence of SEQ ID NO: 231 and
the vlCDR3 having the amino acid sequence of SEQ ID NO: 232;
xxxi. the vhCDR1 having the amino acid sequence of SEQ ID NO: 235,
the vhCDR2 having the amino acid sequence of SEQ ID NO: 236,
the vhCDR3 having the amino acid sequence of SEQ ID NO: 237,
the vlCDR1 having the amino acid sequence of SEQ ID NO: 240,
the vlCDR2 having the amino acid sequence of SEQ ID NO: 241 and
the vlCDR3 having the amino acid sequence of SEQ ID NO: 242; and
xxxii. the vhCDR1 having the amino acid sequence of SEQ ID NO: 245,
the vhCDR2 having the amino acid sequence of SEQ ID NO: 246,
the vhCDR3 having the amino acid sequence of SEQ ID NO: 247,
the vlCDR1 having the amino acid sequence of SEQ ID NO: 250,
the vlCDR2 having the amino acid sequence of SEQ ID NO: 251 and
the vlCDR3 having the amino acid sequence of SEQ ID NO: 252.

5. The anti-IL18-BP antibody of claim 4, wherein said antibody comprises the heavy chain variable domain and the light chain variable domain of an antibody selected from the group consisting of:
i. the heavy chain variable domain having the amino acid sequence of SEQ ID NO: 154 and the light chain variable domain having the amino acid sequence of SEQ ID NO: 15959;
ii. the heavy chain variable domain having the amino acid sequence of SEQ ID NO: 64 and the light chain variable domain having the amino acid sequence of SEQ ID NO: 69;
iii. the heavy chain variable domain having the amino acid sequence of SEQ ID NO: 74 and the light chain variable domain having the amino acid sequence of SEQ ID NO: 79;
iv. the heavy chain variable domain having the amino acid sequence of SEQ ID NO: 84 and the light chain variable domain having the amino acid sequence of SEQ ID NO: 89;
v. the heavy chain variable domain having the amino acid sequence of SEQ ID NO: 94 and the light chain variable domain having the amino acid sequence of SEQ ID NO: 99;
vi. the heavy chain variable domain having the amino acid sequence of SEQ ID NO: 104 and the light chain variable domain having the amino acid sequence of SEQ ID NO: 109;
vii. the heavy chain variable domain having the amino acid sequence of SEQ ID NO: 114 and the light chain variable domain having the amino acid sequence of SEQ ID NO: 119;
viii. the heavy chain variable domain having the amino acid sequence of SEQ ID NO: 124 and the light chain variable domain having the amino acid sequence of SEQ ID NO: 129;
ix. the heavy chain variable domain having the amino acid sequence of SEQ ID NO: 134 and the light chain variable domain having the amino acid sequence of SEQ ID NO: 139;
x. the heavy chain variable domain having the amino acid sequence of SEQ ID NO: 144 and the light chain variable domain having the amino acid sequence of SEQ ID NO: 149;
xi. the heavy chain variable domain having the amino acid sequence of SEQ ID NO: 54 and the light chain variable domain having the amino acid sequence of SEQ ID NO: 59;
xii. the heavy chain variable domain having the amino acid sequence of SEQ ID NO: 164 and the light chain variable domain having the amino acid sequence of SEQ ID NO: 169;
xiii. the heavy chain variable domain having the amino acid sequence of SEQ ID NO: 174 and the light chain variable domain having the amino acid sequence of SEQ ID NO: 179;
xiv. the heavy chain variable domain having the amino acid sequence of SEQ ID NO: 184 and the light chain variable domain having the amino acid sequence of SEQ ID NO: 189;
xv. the heavy chain variable domain having the amino acid sequence of SEQ ID NO: 194 and the light chain variable domain having the amino acid sequence of SEQ ID NO: 199;
xvi. the heavy chain variable domain having the amino acid sequence of SEQ ID NO: 204 and the light chain variable domain having the amino acid sequence of SEQ ID NO: 209;
xvii. the heavy chain variable domain having the amino acid sequence of SEQ ID NO: 214 and the light chain variable domain having the amino acid sequence of SEQ ID NO: 219;
xviii. the heavy chain variable domain having the amino acid sequence of SEQ ID NO: 224 and the light chain variable domain having the amino acid sequence of SEQ ID NO: 229;
xix. the heavy chain variable domain having the amino acid sequence of SEQ ID NO: 234 and the light chain variable domain having the amino acid sequence of SEQ ID NO: 239; and
xx. the heavy chain variable domain having the amino acid sequence of SEQ ID NO: 244) and the light chain variable domain having the amino acid sequence of SEQ ID NO: 249.

6.-10. (canceled)

11. The anti-IL18-BP antibody of claim 1, wherein said antibody comprises:
A:
i. a heavy chain variable domain, comprising:
a) CDR-H1 having the sequence Y-T-F-X-X2-Y-A-X3-H, wherein X is N, R, D, G or K; X2 is S, H, I or Q; X3 is M or V;
b) CDR-H2 having the sequence W-I-H-A-G-T-G-X-T-X2-Y-S-Q-K-F-Q-G, wherein X is N, A or V; X2 is K or LW-I-H; and
c) CDR-H3 having the sequence A-R-G-L-G-X-V-G-P-T-G-T-S-W-F-D-P, wherein X is S or E; and
ii. a light chain variable domain, comprising:
a) CDR-L1 having the sequence R-A-S-Q-G-I-S-S-W-L-A;
b) CDR-L2 having the sequence E-A-S-S-L-E-S; and
c) CDR-L3 having the sequence Q-Q-Y-R-X-X2-P-F-T, wherein X is S, V, Y, L or Q; X2 is F, S or G;
B:
i. a heavy chain variable domain, comprising:
a) CDR-H1 having the sequence G-T-F-X-X2-Y-X3-I-S, wherein X is S or N; X2 is E or S; X3 is V or P
b) CDR-H2 having the sequence G-I-I-P-X-X2-G-T-A-X3-Y-A-Q-K-F-Q-G, wherein X is G or Y; X2 is A or S; X3 is N, I, or V; and
c) CDR-H3 having the sequence A-R-G-R-H-X-H-E-T, wherein X is S, G or F; and
ii. a light chain variable domain, comprising:
a) CDR-L1 having the sequence R-A-S-Q-G-I-S-S-W-L-A
b) CDR-L2 having the sequence A-A-S-S-L-Q-S
c) CDR-L3 having the sequence Q-Q-V-Y-X-X2-P-W-T, wherein X is S or R; X2 is L I, or F;
C:
i. a heavy chain variable domain, comprising:
a) CDR-H1 having the sequence F-T-F-X-N-X2-A-M-S, wherein X is G or D or S; XXY is T or V or Y;
b) a CDR-H2 having the sequence A-I-S-X-X1-X2-G-S-T-Y-Y-A-D-S-V-K-G, wherein X is G or A; X2 is N or S; X3 is A or G; and
c) a CDR-H3 having the sequence A-K-G-P-D-R-Q-V-F-D-Y; and
ii. a light chain variable domain, comprising:
a) a CDR-L1 having the sequence R-A-S-Q-G-I-X-S-W-L-A, wherein X is S or D;
b) a CDR-L2 having the sequence A-A-S-S-L-Q-S; and
c) a CDR-L3 having the sequence Q-H-A-X-X1-F-P-Y-T, wherein X is Y or L; X1 is S or F;
D:
i. a heavy chain variable domain, comprising:
a) CDR-H1 having the sequence G-S-I-S-S-X-X2-Y-X3-W-G, wherein X is S or P; X2 is E or D; X3 is G, Y, or P;
b) CDR-H2 having the sequence S-I-X-X2-X3-G-X4-T-Y-Y-N-P-S-L-K-S, wherein X is Y or V; X2 is Y or N; X3 is Q or S; X4 is S or A; and
c) CDR-H3 having the sequence A-R-G-P-X-R-Q-X2-F-D-Y, wherein X is Y or H, X2 is V or L; and
ii. a light chain variable domain, comprising:
a) CDR-L1 having the sequence R-A-S-Q-G-I-S-S-W-L-A
b) CDR-L2 having the sequence A-A-S-S-L-Q-S
c) CDR-L3 having the sequence Q-Q-G-X-X2-F-P-Y-T, wherein X is S or F; X2 is S or V;
E:
i. a heavy chain variable domain, comprising:
a) CDR-H1 having the sequence Y-T-F-X-X2-Y-A-X3-H, wherein X is any amino acid; X2 is any amino acid; X3 is any amino acid;
b) CDR-H2 having the sequence W-I-H-A-G-T-G-X-T-X2-Y-S-Q-K-F-Q-G, wherein X is any amino acid; X2 is any amino acid; and
c) CDR-H3 having the sequence A-R-G-L-G-X-V-G-P-T-G-T-S-W-F-D-P, wherein X is any amino acid; and
ii. a light chain variable domain, comprising:
a) CDR-L1 having the sequence R-A-S-Q-G-I-S-S-W-L-A;
b) CDR-L2 having the sequence E-A-S-S-L-E-S; and
c) CDR-L3 having the sequence Q-Q-Y-R-X-X2-P-F-T, wherein X is any amino acid; X2 is any amino acid;
F:
i. a heavy chain variable domain, comprising:
a) CDR-H1 having the sequence G-T-F-X-X2-Y-X3-I-S, wherein X is any amino acid; X2 is any amino acid; X3 is any amino acid;
b) CDR-H2 having the sequence G-I-I-P-G-X2-G-T-A-X3-Y-A-Q-K-F-Q-G, wherein X is any amino acid; X2 is any amino acid; X3 is any amino acid; and
c) CDR-H3 having the sequence A-R-G-R-H-X-H-E-T, wherein X is any amino acid; and
ii. a light chain variable domain, comprising:
a) CDR-L1 having the sequence R-A-S-Q-G-I-S-S-W-L-A;
b) CDR-L2 having the sequence A-A-S-S-L-Q-S; and
c) CDR-L3 having the sequence Q-Q-V-Y-X-X2-P-W-T, wherein X is any amino acid; X2 is any amino acid;
G:
i. a heavy chain variable domain, comprising:
a) CDR-H1 having the sequence F-T-F-X-N-X2-A-M-S, wherein X is any amino acid; X2 is any amino acid;
b) CDR-H2 having the sequence A-I-S-X-X1-X2-G-S-T-Y-Y-A-D-S-V-K-G, wherein X is any amino acid; X2 is any amino acid; X3 is any amino acid; and
c) CDR-H3 having the sequence A-K-G-P-D-R-Q-V-F-D-Y;
ii. a light chain variable domain, comprising:
a) CDR-L1 having the sequence R-A-S-Q-G-I-X-S-W-L-A, wherein X is any amino acid;
b) CDR-L2 having the sequence A-A-S-S-L-Q-S; and
c) CDR-L3 having the sequence Q-H-A-X-X1-F-P-Y-T, wherein X is any amino acid; X2 is any amino acid;
H:
i. a heavy chain variable domain, comprising:
a) CDR-H1 having the sequence G-S-I-S-S-X-X2-Y-X3-W-G, wherein X is any amino acid; X2 is any amino acid; X3 is any amino acid;
b) CDR-H2 having the sequence S-I-X-X2-X3-G-X4-T-Y-Y-N-P-S-L-K-S, wherein X is any amino acid; X2 is any amino acid; X3 is any amino acid; X4 is any amino acid; and
c) CDR-H3 having the sequence A-R-G-P-X-R-Q-X2-F-D-Y, wherein X is any amino acid, X2 is any amino acid; and
ii. a light chain variable domain, comprising:
a) CDR-L1 having the sequence R-A-S-Q-G-I-S-S-W-L-A;
b) CDR-L2 having the sequence A-A-S-S-L-Q-S; and
c) CDR-L3 having the sequence Q-Q-G-X-X2-F-P-Y-T, wherein X is any amino acid; X2 is any amino acid;
I:
i. a heavy chain variable domain, comprising:
a) CDR-H1 having the sequence Y-T-F-X-X2-Y-A-X3-H, wherein X is N, R, D, G, T, Q, S, A or K; X2 is S, H, I, N, L, Y or Q; X3 is M or V;
b) CDR-H2 having the sequence X-I-X2-A-G-X3-X4-X5-T-X6-Y-S-Q-K-F-Q-G, wherein X is W or Y: X2 is H or N; X3 is S, T or A; X4 is G or A; X5 is N, A, T or V; X6 is E, K or L; and
c) CDR-H3 having the sequence A-R-G-L-G-X-V-G-P-T-G-T-S-W-F-D-P, wherein X is S, L, A, K or E; and
ii. a light chain variable domain, comprising:
a) CDR-L1 having the sequence R-A-S-Q-G-I-S-S-W-L-A;
b) CDR-L2 having the sequence E-A-S-S-X-E-S, wherein X is L or S; and
c) CDR-L3 having the sequence Q-Q-Y-R-X-X2-P-F-T, wherein X is S, V, Y, L, T or Q; X2 is F, S, Y or G;
J:
i. a heavy chain variable domain, comprising:
a) CDR-H1 having the sequence G-T-F-X-X2-Y-X3-I-S, wherein X is S or N; X2 is E or S; X3 is V or P
b) CDR-H2 having the sequence G-I-I-P-X-X2-G-T-A-X3-Y-A-Q-K-F-Q-G wherein X is G, S, I or Y; X2 is A, V or S; X3 is N, I or V; and
c) CDR-H3 having the sequence A-R-G-R-H-X-H-E-T, wherein X is S, G, or F; and
ii. a light chain variable domain, comprising:
a) CDR-L1 having the sequence R-A-S-Q-G-I-S-S-W-L-A;
b) CDR-L2 having the sequence A-A-S-S-L-Q-S; and
c) CDR-L3 having the sequence Q-Q-X-Y-X2-X3-P-W-T, wherein X is V or L; X2 is S or R; X3 is L, I or F;
K:
i. a heavy chain variable domain, comprising:
a) CDR-H1 having the sequence F-T-F-X-X2-X3-X4-M-S, wherein X is G, S, P or D or S; X2 is N, S or P; X3 is T, V or Y; X4 is A, H or I;
b) a CDR-H2 having the sequence A-I-S-X-X2-X3-X4-X5-T-X6-Y-A-D-S-V-K-G, wherein X is G or A; X2 is N, T, E or S; X3 is A or G; X4 is A or G; X5 is S or G; X6 is Y or F; and
c) a CDR-H3 having the sequence A-K-G-P-D-R-Q-V-F-D-Y; and
ii. a light chain variable domain, comprising:
a) a CDR-L1 having the sequence R-A-S-Q-G-I-X-S-W-L-A, wherein X is S or D;
b) a CDR-L2 having the sequence A-A-S-S-L-Q-S; and
c) a CDR-L3 having the sequence Q-H-X-X2-X3-F-P-Y-T, wherein X is A or G; X2 is Y, R or L; X3 is S, R, L or F; or
L:
i. a heavy chain variable domain, comprising:
a) CDR-H1 having the sequence G-S-I-X-S-X2-X3-Y-X4-W-X5, wherein X is S or F; X2 is S or P; X3 is E or D; X4 is G, P or Y; X5 is G or S;
b) CDR-H2 having the sequence X-I-X2-X3-X4-G-X5-T-Y-Y-N-P-S-L-K-S, wherein X is S or V; X2 is Y, V, F or A; X3 is Y, F or N; X4 is Q, A or S; X5 is S, A or N; and
c) CDR-H3 having the sequence A-R-G-P-X-R-Q-X2-F-D-Y, wherein X is Y, H or F; X2 is V or L; and
ii. a light chain variable domain, comprising:
a) CDR-L1 having the sequence R-A-S-Q-G-I-S-S-W-L-A;
b) CDR-L2 having the sequence A-A-S-S-L-Q-S; and
c) CDR-L3 having the sequence Q-Q-G-X-X2-F-P-Y-T, wherein X is S N, W or F; X2 is S or V.

12.-33. (canceled)

34. The anti-IL18-BP antibody of claim 4, wherein said antibody comprises a CH1-hinge-CH2-CH3 region from human IgG1, IgG2, IgG3, or IgG4, and/or wherein said hinge region comprises mutations; and/or said antibody comprises the CH1-hinge-CH2-CH3 region from human IgG4.

35. (canceled)

36. (canceled)

37. The anti-IL18-BP antibody of claim 4, wherein said antibody comprises a CL region of human kappa 2 light chain; and/or wherein said antibody comprises a CL region of human lambda 2 light chain.

38.-40. (canceled)

41. A method of treating cancer in a patient, comprising administering the anti-IL18-BP antibody of claim 4, wherein said anti-IL18-BP antibody activates T cells, NK cells, NKT cells, Dendritic cells, MAIT T cells, γδ T cells, and/or innate lymphoid cells (ILCs), and/or modulates Myeloid cells, and said cancer is treated.

42. A method of activating T-cells of a patient comprising administering the anti-IL18-BP antibody of claim 4, and wherein said T-cells are activated.

43.-49. (canceled)

50. A method of increasing IL-18 mediated immuno-stimulating activity in the tumor microenvironment (TME), and/or lymph nodes, comprising administering the anti-IL18-BP antibody of claim 4, wherein said anti-IL18-BP antibody increases IL-18 mediated immuno-stimulating activity in the TME, and/or lymph nodes.

51. A method of restoring IL-18 activity on T cells, NK cells, NKT cells, Myeloid cells, Dendritic cells, MAIT T cells, γδ T cells, and/or innate lymphoid cells (ILCs), comprising administering the anti-IL18-BP antibody of claim 4, wherein said anti-IL18-BP antibody restores activity on T cells, NK cells, NKT cells, Myeloid cells, Dendritic cells, and/or innate lymphoid cells (ILCs).

52. The method of claim 41, wherein said anti-IL18-BP antibody is administered as a stable liquid pharmaceutical formulation.

53. The method of claim 41, wherein said T-cells are cytotoxic T-cells (CTLs), and/or wherein said T-cells are selected from the group consisting of CD4+ T-cells and CD8+ T-cells.

54. (canceled)

55. The method of treatment of claim 41, wherein said patient for treatment comprises an increase in tumor growth inhibition of at least about 10%, 20%, 30%, 40%, 50%, 60%, 70%, 80%, 90%, 100%, 125%, 150%, 175%, 200%, 225%, 250%, 275%, 300%, 325%, 350%, 375%, 400%, 425%, 450%, 475%, 500%, 525%, 550%, 575%, 600%, 625%, 650%, 675%, 700%, 725%, 750%, 775%, 800%, 825%, 850%, 875%, 900%, 925%, 950%, 975%, or 1000%, as compared to a control or an untreated patient; and/or
wherein said patient exhibits a decrease in tumor growth of at least about 10%, 20%, 30%, 40%, 50%, 60%, 70%, 80%, 90%, 100%, 125%, 150%, 175%, 200%, 225%, 250%, 275%, 300%, 325%, 350%, 375%, 400%, 425%, 450%, 475%, 500%, 525%, 550%, 575%, 600%, 625%, 650%, 675%, 700%, 725%, 750%, 775%, 800%, 825%, 850%, 875%, 900%, 925%, 950%, 975%, or 1000%, as compared to a control or an untreated patient.

56. (canceled)

57. A method of claim 41, wherein
(i) said NK-cells are CD16+ lymphocytes,
(ii) said NK-cells are CD56+ NK cells, or
(iii) said activation is measured as an increase in expression of one or more activation makers.

58. (canceled)

59. (canceled)

60. A method according to claim 41, wherein said activation markers are selected from the group consisting of CD107a, CD137, CD69, granzyme, and perforin.

61. A method according to claim 41, wherein said activation is measured as an increase in proliferation of said NK-cells, and/or wherein said activation is measured as an increase in secretion of one or more cytokines.

62. (canceled)

63. A method according to claim 41, wherein said one or more cytokines is selected from the group consisting of IFNg, TNF, GMCSF, MIG (CXCL9, IP-10 (CXCL10 and MCP1 (CCL2); and/or wherein said activation is measured as an increase in direct killing of target cells.

64. (canceled)

65. The method according to claim 41, further comprising administering a second antibody, and/or wherein the said second antibody is an antibody that binds to and/or inhibits a human checkpoint receptor protein, and/or wherein said second antibody is selected from the group consisting of an anti-PVRIG antibody, an anti-PD-1 antibody, an anti-PD-L1 antibody, an anti-TIGIT antibody, an anti-CTLA-4 antibody, an anti-PD-L2 antibody, an anti-B7-H3 antibody, an anti B7-H4 antibody, an anti-CEACAM-1 antibody, an anti-PVR antibody, an anti-LAG3 antibody, an anti-CD112 antibody, an anti-CD96 antibody, an anti-TIM3 antibody, an anti-BTLA antibody, an anti-ICOS antibody, an anti-OX40 antibody, or an anti-41BB antibody, an anti-CD27 antibody, or an anti-GITR antibody.

66.-79. (canceled)

80. The method according to claim 65, wherein said anti-IL18-BP antibody and the second antibody are administered sequentially or simultaneously, in any order, and in one or more formulations.

81. The method according to claim 41, wherein said anti-IL18-BP antibody is for use in combination with an immunostimulatory antibody, a cytokine therapy, an immunomodulatory drug, cytotoxic agents, chemotherapeutic agents, growth inhibitory agents, anti-hormonal agents, kinase inhibitors, anti-angiogenic agents, cardioprotectants, immunosuppressive agents, agents that promote proliferation of hematological cells, angiogenesis inhibitors, protein tyrosine kinase (PTK) inhibitors, or other therapeutic agents.

82. The method according to claim 41, further comprising administering one or more inflammasome activators.

83. The method according to claim 82, wherein said inflammasome activator is a chemotherapy agent, and/or wherein said chemotherapy agent is selected from the group consisting of Platinum (including Platinum chemotherapy agent), Paclitaxel (taxol), Sorafenib, Doxorubicin, Sorafenib, 5-FU, Gemcitabine, and Irinotecan (CPT-11, and/or wherein said Platinum chemotherapy agent is Oxaliplatin or Cisplatin.

84. (canceled)

85. (canceled)

86. The method according to claim 82, wherein said inflammasome activator is a CD39 inhibitor, and/or wherein the CD39 inhibitor is an anti-CD39 antibody.

87. (canceled)

88. The method according to claim 81, wherein said anti-IL18-BP antibody and the immunostimulatory antibody, cytokine therapy, immunomodulatory drug, cytotoxic agents, chemotherapeutic agents, growth inhibitory agents, anti-hormonal agents, kinase inhibitors, anti-angiogenic agents, cardioprotectants, immunosuppressive agents, agents that promote proliferation of hematological cells, angiogenesis inhibitors, protein tyrosine kinase (PTK) inhibitors, or other therapeutic agents are administered sequentially or simultaneously, in any order, and in one or more formulations.

89. The method of treatment according to claim 41, wherein said cancer is selected from the group consisting of vascularized tumors, melanoma, non-melanoma skin cancer (squamous and basal cell carcinoma), mesothelioma, squamous cell cancer, lung cancer, small-cell lung cancer, non-small cell lung cancer, neuroendocrine lung cancer (including pleural mesothelioma, neuroendocrine lung carcinoma), NSCL (large cell), NSCLC large cell adenocarcinoma, non-small cell lung carcinoma (NSCLC), NSCLC squamous cell, soft-tissue sarcoma, Kaposi's sarcoma, adenocarcinoma of the lung, squamous carcinoma of the lung, NSCLC with PDL1>=50% TPS, neuroendocrine lung carcinoma, atypical carcinoid lung cancer, cancer of the peritoneum, esophageal cancer, hepatocellular cancer, liver cancer (including HCC), gastric cancer, stomach cancer (including gastrointestinal cancer), pancreatic cancer, glioblastoma, cervical cancer, ovarian cancer, urothelial cancer, bladder cancer, hepatoma, glioma, brain cancer (as well as edema, such as that associated with brain tumors), breast cancer (including, for example, triple-negative breast cancer), testis cancer, testicular germ cell tumors, colon cancer, colorectal cancer (CRC), colorectal cancer MSS (MSS-CRC); refractory MSS colorectal; MSS (microsatellite stable status), primary peritoneal cancer, primary peritoneal ovarian carcinoma, microsatellite stable primary peritoneal cancer, platinum resistant microsatellite stable primary peritoneal cancer, CRC (MSS unknown), rectal cancer, endometrial cancer (including endometrial carcinoma), uterine carcinoma, salivary gland carcinoma, kidney cancer, renal cell cancer (RCC), renal cell carcinoma (RCC), gastro-esophageal junction cancer, prostate cancer, vulval cancer, thyroid cancer, hepatic carcinoma, carcinoid carcinoma, head and neck cancer, B-cell lymphoma (including non-Hodgkin's lymphoma, as well as low grade/follicular non-Hodgkin's lymphoma (NHL), small lymphocytic (SL) NHL, intermediate grade/follicular NHL, intermediate grade diffuse NHL, Diffuse Large B cell lymphoma, high grade immunoblastic NHL, high grade lymphoblastic NHL, high grade small non-cleaved cell NHL, bulky disease NHL, mantle cell lymphoma, AIDS-related lymphoma, and Waldenström's Macroglobulinemia, Hodgkin's lymphoma (HD), chronic lymphocytic leukemia (CLL), acute lymphoblastic leukemia (ALL), T cell Acute Lymphoblastic Leukemia (T-ALL), Acute myeloid leukemia (AML), Hairy cell leukemia, chronic myeloblastic leukemia, multiple myeloma, post-transplant lymphoproliferative disorder (PTLD), abnormal vascular proliferation associated with phakomatoses, Meigs' syndrome, Merkel Cell cancer, MSI-high cancer, KRAS mutant tumors, adult T-cell leukemia/lymphoma, adenoid cystic cancer (including adenoid cystic carcinoma), melanoma, malignant melanoma, metastatic melanoma, pancreatic cancer, pancreatic adenocarcinoma, ovarian cancer (including ovarian carcinoma), pleural mesothelioma, cervical squamous cell carcinoma (cervical SCC), anal squamous cell carcinoma (anal SCC), carcinoma of unknown primary, gallbladder cancer, pleural mesothelioma, chordoma, endometrial sarcoma, chondrosarcoma, uterine sarcoma, uveal melanoma, amyloidosis, AL-amyloidosis, astrocytoma, and Myelodysplastic syndromes (MDS).

90. The method of treatment of claim 41, wherein said cancer is selected from the group consisting of renal clear cell carcinoma (RCC), lung cancer, NSCLC, lung adenocarcinoma, lung squamous cell carcinoma, gastric adenocarcinoma, ovarian cancer, endometrial cancer, breast cancer, triple negative breast cancer (TNBC), head and neck tumor, colorectal adenocarcinoma, melanoma, and metastatic melanoma.

91.-96. (canceled)

97. An anti-IL18-BP antibody according to claim 4, wherein the anti-IL18-BP antibody exhibits a binding affinity or KD of less than 0.005 pM, 0.01 pM, 0.02 pM, 0.03 pM, 0.04 pM, 0.05 pM, 0.06 pM, 0.07 pM, 0.08 pM, 0.09 pM, 0.10 pM, 0.15 pM, 0.20 pM, 0.25 pM, 0.30 pM, 0.35 pM, 0.40 pM, 0.45 pM, 0.50 pM, 0.55 pM, 0.60 pM, 0.65 pM, 0.70 pM, 0.75 pM, 0.80 pM, 0.85 pM, 0.90 pM, 0.95 pM, or 1 pM.

98. A composition comprising an anti-IL18-BP antibody of claim 4.
